United States Patent Application Publication US 2024/0287513 A1 - sequence listing, part 2

SEQ ID NO: 79 - DNA, 184486 bp, Homo sapiens
  source 1..184486: mol_type = genomic DNA
tcacgtgcatgcccagtcgggaggacgccctcagtgggagagccctgctcaggttctccccgaggccgaggtggtggtgggagcgggcggtggccccgggatcaaaggacctccgccgggttagctttggcagtgccgcagccaacccagcaggacgcttattttcaagcctggggaacgtagttcctcccgctttcacagcaggatggagcccgacggcaccccggttaaagggcctttccagagccctccggggaacggaaggccgcgctcctccgggagggagaacgacacactcttcgaggaaatcctggggcgggcgctctcctcgctgccgggacctttgtttctaagctggccacagctagagcagccttaagtgtcccaatgacacgcctgctatcgagcgccctcccggcggcccctcctcagccagctgcccagcgggcgtcctcaggtgtccccaagaggcgcaggcctagtcgcctacacgtcctttccaacttcgtcagctctggcttcccaccacccctcccggctctgcggcggcccagcctcttctccggttaattccggcctgtgcggcccggtcgtcccgtaaagaaggcaagcccgggttccgggtgaggggttggtgggtcagggtgggaaagcaaggcagcggtgagtcctctgctagcagatcgggctcaatatccccattccctgttttctccgggcccgccctccgcctctcaggcggccgccatgaagatcctctgccgcggctgcagccggtctgcaaacacacgcccacccgcacgcttagcctcgctcgccacagagggaggggtggaaaaggcactgagcatgctcggtggggagggcggggcgctcgtgggctgcgagtcggggccggagctcttcaggccggctcccgcgcctccgccgcccgcccgctcggagccgcgcccgccgcaggctgcgcccgccagtcccgccccgccccgccccgccccgccccccgccgctcgtccccgccgcggccgcgccgcctgcagcagcaccagctgctcctccccggcggccgccccccgcgggtccctccctggctgcgggagagacggaggtagagggaggacacagagccgcgccgcccgcaccacagaccttcgcctcgccccgccggttcctcaccctcggggagcaacatgggtaagtcatccttcctccgccgtcatcgcctgacatttttttctttctcggcgtgctgcagggtgggaagcatttctcgcgcaaagttgccggatttctccagtccccgggtgtgagacggtggctgttcctccggggagagtcggcgcacgcggaacgcacgccgggtgccggggctgggagggtcccgagcgcgggctggggtggggtcggccgcgggccggaccgccgcccggctccccggcacctcgcagcctcgcctcccctcctccattcttcctgccggtgcccgggcaccacggagcctgcctcgcgggctcgcatctgcagctccatccccgtttctccagaggccgcccgcttccttttcccccgcgtgtactgagctcgaggctcgggtccgaccactaccacttcgtgtaacttccttctctgtcagtgcgacctttccccgtcgtggagactcctcatcccgggcggggaagtggaagcaagtagtttgtgagggagatcttacaacctgcacggaaattattttccaagggggagagcggacagcctcataggttgaaaggatgacttgtcagaggccacgaggaacgtgaggcaggatagagccgctagctgttgaattagtgctgggtgactacagtgtgcaatattcccgtgcccagcctattttctggattccttcgtccgtcttctgtagcaggaaactgcgccctgtaacgttgttaccgaacttacatggtagttattctttcccagcttcctcctgtctaatctgcataatctgattttagttcctttgtatttatagttaatctgaagagattggtttggatgagagatttaagagcaaatatgttttataaaacgatatatacatttgacctaatttttttacatcatctattgcttaactgttacattcagtaatcacagaaacgtctgatgaatgctgtcatgtaattaagagctcaaagtttcttttaatagtagcgacttgtactaagttccccagtttgcttccactcctgtctgtcataatttcctctttttaaaatttgctcccttggcatctgtcagctgggacttttcccaccccttctgtgcgagttatttaaagcttgagatgaatgtggtcctttcatctgttaatacagtgctcaacacgttcagagttaggtggtgcaactcagaatcttcaagaagtatctaaacctgggaatggtgtccatagagttttctggaacagcaaatgcttcaggctttgatcccgacctttggccatatatctggaagaggccagggttgacggaggaggtggtatgaatcaaaaaaggtctagggctctgaattttattttcagttgttttttctttttaacgtgagtactcgatatgctgaacaaatttctgtaaaaattgggtggcccatttatgcgtgtctgcctttctcttaaagtagatttttaaataggtattatatcagattattggacaagctgtatatttccgtcgaacatacacacgtttatgtgtgttccctttgaacatacacagataaaatacactttgaaataaaattcctttgaacatacatacacagataagtgtgtgtatgttcaaaggaaatatacagtatgtccaataaccctatctgatattggactgtaagttcaagtttggcttgcaaaatatattttcccatgtttccaggtgagccttaaacaatccatttaacattttagcttacatgttaaatccgtactttttcagtggaaaaaatccaattccgttacaacactggtgaataaaaatacctaaaagaaattatctacttaaaaataatcttcaaaatcttgagtgctattgcttgatttttaaaaagggccaaatagaaacctatctctcattttgaagccatctctgatactctttggttaatctgtctcttcataagcactgtttgtaccttgttagaagctttttagcacttacgtaatctaccatataataaagttgtttatgtgtgtgctgtgcatttaatcatgagtcccagaagatgaaaagtgtcttattattttttgtgttccccacagtgcttttcaaatagaaattcagtaaatctttggcaaattgttgaacttaaagccacctattattttcaacttttgaacctgaagatatagtcttcatctgaacaaacatttgggttggtacatattatctagttgggggataagcagaaacagaaaggtataattgtaccatgcctcccagtacactgtaggttggttttgagtcaacctcaggcaatctgtttccttctaaactctcttcaatggtaaggcagtttcatgtatgatcagtaggtacatatgataatttaaaattgaaaccttggggaacagttttatatctgggccaaggaagttagtataacaattcatgtacacataagaaggtagaaggtatactggttaatgatgaggggagggagaagtgctttttaatttgtctcaagaaataaataaggttgatttttaaagatagtctcagccgggcgcgcactttgggaggccgaggcgggcggatcacctgaggtcaggagttggagaccagcctgactaacatggtaaaaccctgtctctactaaaaatacaaaaaaacaattagccgggtgtggtggcgggcgcctgtaatcccagctgtttgggaggctgaggcaggagaatcacttgaacccgggaggcggagtttgcagtgagccgagatcatgccattgcactccagcctgggcaacaagagggaaactctgtctcaaaaaaaatatatatatatattctcatggcaataatttcctacacaagagagtgaaagaaaagtcctatataactttatggccatagctactattttatgtatatgtcatatttcagattcaacatacatttagtgtttgttggatatcaactgtgcagtgtactgtactacagtgtactgggaggacaaagataaaaagatattcatgtttcacatttataatcttagcaggaacaatatgacacatacacaaattataatagaagtaaaagtataagttatataaaagacctttacatatattatagattcagagaatggagagaacgttttagagaaatggtgttatttgaaccaaaggtgggttaaacttcttaaaggtagaaatgagactgttaatcagaatggagttggtctggggttggaagagaaatgacataaatgaagatagataggaaacattttatgaatttccaggatatgattaaacagcattgtttggctagagcaaaaggtaaggaaatagtgggtaacagacatgaaaaagtagtacagtaatagctaatgaccagataatgtaggatctaaaatgccaagctgaagaattttaatctgacttacctattgagagaccactaaacatttttatgtagttaagtgatggatcacatctgtggtataggaaaatttgtcagttgagtgcaggatcgattagatgagaaactacagaacacttcagaagattgttgttggagtttggacgaaaatgtttaatggcttgaaccaggttatggcaacgggaatagaatattgcaaataaagaataggatttacttggcaacccattgagtatggaattgagagtcacaggttttagcctgggtgataatgaggatacgagaatctcctgatacatattcagttaacaggaagaggaaacttagatactcaattttggacctattgcattagactttttggtctgtcctttagtctctgctccttgataacaaggacgttgtcatattaggatttgaatacatttctaacactagtgtctggcacatagtagctacatagaaaaattgtgttgactgactgaaactagataaaaaatagttgacaaacatttattttaactttcgagagtacaatttgaattagagatctggaagttatccacaaatatcctgaggtgatatttgaagttagatcagaggacaagagtcaacaaagaaaaagaggaaaattgttcatggtaagaatcttgaggaatggggttccttaagttttccgtagttagggaaaaaggaatggtatgatttcacactgaaaaacacagaagtcagagtgaaagactagaattggtatatggttggttttaagaaagagtgaatagttaataaggtctgttttttcagaacagtcaggagggtgatagggactgagaacaggctctaagtgctttggttaggatattacccagtatatttttctaaaaagccactttaagaggtttagtagatatggaggtcagttgtaaaggctaagtgaataataagtggaaacagttcactaggtatagtcatgctgtatttctcaccttgtttaaagatctgtgagaaaacatagatttttaaaaatatttttaactcactctgcatgacagatattacattttagaaaatattttaaaattttaaatgtattttaatttacaaattaaaaaaattattttaatgttacattttacatggaaggacatgtgctgttttcatgtctaaggataatttttaatttcaccatagtgcctcacatttctctgacatttcatttttaatgtctttgtgacttagtatagtacaatttttatttttataatgtctgtcatgcagagtgagtctagaatgattttataattttgcatggcattttgcctaaacaatactctttactgatgaatggttttatcacttttactcttagactttgtgaatttgagacttctttagattataggtatgcttctaattatatttttaattcctggagttgtagttttctctgtagataggtatcaaacttatagtcattttattttgcctgtatttccaagtccaggaatggttttcatagctaaataataaatactaattttgcctgatctttgcaagtctaggcagggtgataaaatatttttgaaagctggtaattactaaaatttatgatttcaaaaaagcatagatgctagcttggtaaatttaaaaatttttcttatgttggcattatatctgttttgtatatgtcttttttcatatgggagaaaggttgaattcactatccttggtagtcatattctgaagtctgtactactactatttgaaaaattataatagccttaactctttttaagaaccaaaatgattttgctttcatagtggaatcttggaatttctaggtgactttggggaaatagtgtggatgctctccagaaattcctgattgaacctgagattgaacatagcaattctggagttattggtggcactaacaacagccatcagaattacctaaattttaatatccagtcatgaacatcaggaggaatgaaggaggaagattcagtcctttgggaacctgatgtaattttagatagccaaatgtttggataactgataaggaaaaagtttaatttaaaatacatgttgatgttgagttcagtttgccagtattttgttgaggatttttctatttatgtttattaaggatattagcttgtagtttcttttcttgtagtatcattgtctggctttggtatcagggtaatgctggcctcattaaatgagtttggaagtatttcccttcattgtttggaaagagtttgaggaggattggtattagttccttttttaaaataatttcaacttttagtttaggttcagagggtacatgtgcatgttttttacatgggcatgttatgtgacactttggagtatgaataatcccatcacccaggggtttggagtatgaataatcccatcacccaggtagtgtgcatggtacccagtgggtagtttttcagcccttgcctccctccatttgtccccctctagtagtccccagtatctgttgttcccatctttatgtccatatgtacacccagtgcttagcttccgcttataaatgagaacatgtggtatttggatttcttgtttctatgttaatttgcttaggatagtggcctccagctccatccatgttgctgcaaaggacatgatttcattcttttttgtgggtgcatagtattccatggtatatatgtgtcacattttctttatccaatccactattgataggcacctgggttgttttcatgtctttgttattgtgaatagtgctgcgatgaagatccaagagcatgtgcctttttggtagcatgatttatttttctctggaaatatacccagtaatgggatggctgggtcaaatggtagttctgttttaagttcgtcgagaagtctccaaattgcgttccacagtgtctgaactaatttatatttccactaacagtgtaaaaacattctcttttctccacagccttacagcatctgttttttgtttgtttgtttttactttttaataatagccattctgactggtgtgaaatggtgtctcattgtggtttgatttgcagtctcatcacattaagaggatcatacgtcatgatcaagtgggatttatccctgggatgcaagaatggttgaacatacacaaatcaataaatgtgatacaccacgttaacagaatgaagaacaaaaatcatacgatcatctcagttgatgcagaaaaagcatttgacaaaattcaacatactttcatttttaaaactctcaacaaatttggtgtagaatgaatatgcctaaacatagtaaaggtcctatatgacaagcccatagctaacatcatacttaatggtgaaaatctgaaaagtttatctcagattgagaaaaaaaacaaggatgcccactcttgccactgctatttaagatagtactagaagtcctagcagagcaaatagacaagaaaaagaaattaaaaagcattcaaattggagagtaaaatgatctgtttaaagatagcatggtcttatacatagaaagccttaaagactccttgaaaaaaaagacaaaaactattagtcctaataaatgaattcagtaaagtttcaggatacaaaatcagcatagaaaaatcagaagcatttctatacactaacagcaaactttctgaggatgtaatcaagaaaacaatcctatttacagtagctgcaaaaatataaaatatttaggaatagatttaaccaagaaggtgaaagatctctatgctgaaaactgtaagacattgatgaaagaatttgaaaaattaacagatatcccatattcataaattggaagaattaatattgttacaatgttcatagtactgaaagtgatctacagattcaatgtaatccctatcaaaattccagtgaaacttttcacagaaatagcaaaacaattctaaaatttgtatggaaccacaaaagatctgaatagccagaataatcttgagcaagaagaacaaggccaggggcatcacactacatgcttcaagtcatgttacaaagctgtagtgatcaaaacagtatggtactggcataaaagcagacacatagatcaatggaacagaatagagaggccagaaataaacccaagaatttacagtcaattgatcttcaaaaaaaaaaaaaaaaaaaaaagccaaggaaacacaatggggacaggacaatctcttcaataaacactgttgttaaaactagatacccacatactgaagaatgacattggatccttattcatcccatatacaaaaatcagctcaaaatgggtcagagatttaaacaaaagatttgaatttgaaaagcataagatgcgcgcaagaaaatactggagagaagctccataagattggtgttggcaatgattttttgtttatggcaccaaaagcacaggcaacaaaagcaaaaataaacaaatgggacttcatcaaattaataagtttctctgtagcaaaggaaacaacaaaatgaaaaggcagcttacataatgaggggaaatatttgcaagccgtatatccgattaggggttaacacgtaaaaataatcaggaactcatacaactcagtagctaaaataaaataaaaatacaggttgaggatccctaattcaaaatctgaaatgcttcaaaatctgaaactttttgaatgctgacatgacactcaaaggaaatgcacattgcagcatttggatttttggtttcagatttttggattagggatgttaaaccagttagtatcatgcatgtattccaaaatctgaataatttcaaaatctgaaacacttctggtctaaagcattttgcataagggatactcaatctgtatttacctagatgtaaataataaatgaatatattagaataggttattgtctcagtccattttgtgctgctatgacagaatactgcagactgggtaatatataaagaacagaaatttattctatcagagttctggagtctggtaactacaagatcaaagtgcctgcaggtttggtctttggtttcaagatgaggcctagttgctgtgtcctccaaagaggagaaaccttgtgccctcacacaacagaaaagcaaaagagaaaatccactctggtaagctctttttataatgccattaatctatttatgagggcagagccatcataacctaaacacctcccattaccttccagtactgttgtgtttaagtttcaacatgagttttggaggggacaaaaacattcaaaccatatagttataaagactatttcagttataaaagcctgtgattccttgaaactgaagtttgaaatatactccatatcattggtatcttaaatataacctctatataacttgtttttctttagtgttcaaatggtaatgtatacttgaggtagcaacttaagggtttgaaccaactttagctttgtctgaataaatgacctaaaaaaacatttctcaagctggctaagatatggatgctggattcaaattgcaggtgaaataattctctcagtgcttctatttatatagcttttgtaactagaagcatttcaggagttaaaaccaaggactaggttagtgataaatggaagtggttaaattgagctcttagctatgattggctgtacagttgaccgttgaataacatggatttgaacagcgcagttccacttccatgtggatttttttttttcaataaaagctataccaagtgagttgcctctcctgcctccccttttacctcctccacctctgccacacctgagacagctagatgaacccctcctcttctcagcctactcaagagtgactataataaggatgaagacctttatgatgacccacttcccatgtaatgaacagtaaatacattttctcttccttccattttcttttctctagcttaccttattgtaacaatatggtatttgatgcatatggtatatgatgcatataacatacataatatgtgttaattgactgtttatgttattggtaaggcttctggtcagcattaggctattaaggttttagggagttaaaagttatgtgtggatttttgactgagtgagagggggattggtacccctagtgcctgcattgttcaagggtcaacagtacttgttaattccaaagtcctttttgttcacaaaatgactttaggtacttattggtactgaaatatatttattaatatctgggctacatctttgtatttagcagattagtagacatctctactaattaaactcattgagttcaaaataaaactcattttataatttttaataatgataattagaggggtgctggtaaatgtttaactaaacgcctttctccaaaatagccctgatttgtgatggctgtcaatttcctgtggtgtaaatactccccccatggctcatttcaagccgctaaaatagtgtcactgaatgcagagttgagaagagataagaggtagcacatcattatataccatatccaccatacagacataatctcattagcacatataatagtaaaatgtaaagtaagtagtgatggttttgagtgttaattcttctgttttagtataactcatttatgtatatataattatgttttaataactgcctcataaaaatcctgaaaatttaataattatatctcatggggtagtatagggggctgtataccattgagttcataattaccatttattaagaatgattgatgtgagttatgctacactttacatatttttaaaactgaattttaatcctttcaacaattctatgaagtaggtgacactgtctccattttactaaatcaaagaattaaataatttatccaaggggacaactaacactccaacatcctgatttagagcaatggttttcaaacttcagcttgcatagaatcacttgaagagcttgtttttaaaaaatactgggcccaccttcagaagttctggttcaatagatgtggggtgggctgagaatttgcattgtcaagaccttcccaggtgatgccacactgggaacagcaccaccatcaagcataggctgacaagctttttccataaaggaccagatgataaatatttcaggctttgtaggccatgaggcggaatcaaagatactacatattgggttagtgtgtaagtaattgtggtttcagactctgcattttaaataattattactaggcgcaaacacatctttattaatcaaaataggaacattaaaatcaacacatttttgccaatgggaagtaagtttattcctgtagcattaaaatccatgcttcgggatttatcaaacacttggaaagcattttctgcatcctgctggttgtggaagcattttccctcctaaaagttgtcgagatgcttgaagaagtggtagtcagttggtgagaggtcaagtgaatatggcaggtgaggcaaaacttcatagctcggttcgttcaacttttgaagcgttggttgtgcgatctgtggtcggacgttgtcatggagaagaattgggccctttctgttgaccagtgccagctgcagacagtacagttttcagtgcatctcatcaatttgctgagcatacttctcagatttaatggtttcaccgggattcagaaagctgtagtggatcagcagcagaccaccagacagtgaccatgacctttttttggtgcaagtttggctttgggaagtgctttggagcttcttggtccaatcactgaactggtcatctccagttgtataaaatccacttttcagttgccatataaaatccacttcttgttgcacgtcacaatctgatcgagaaatggttcattgttgttgcgtaggatgagagaagacaacgctttaaaacaacgatttttttctgattttcgctgagctcataaggcacccacctatcgagctttttcacctttccaatttgctgcaaatgctgaactaccagagaatggtcgacattgagttcttcggcaacttctcgtgtagttgtaagaggatcagctttgatgattgctctcaattggtcattgtcgacttctcatcttccactaccctcctcatctaggctctcgtctcctttgcaaaacttcttgagccaccactgcactgtatgttcattagcagttcctgggccaagtgcattgttgatgttgctagttgtctccgctgctttacgacccattttgaactcagaaataagaaaatcactcgtaaagagaactgtgcattaaaatgatgtataacataaccacatttatttaagaatgtattcgagcatctaacagcaaatttcaacaatgcaaaaactgcagttatgttgcgccagcctaatagaaaagggaaaaatatatatgagagaacataaatgtccatcattttttttactacatttgaaatatgataacattaattgaacacaatttattgtgattaaaaaatgaaaagactggagttctttttttttaatttatattttttattttaaagttcttttgggataacatttcacttattaagattcaaagttatcctcttatcagaatttattgtagatgttcatctgttaatgcagacctgtaatgcagttttacaaatttcatctttgaggcatttttttccccacacaaataagtactgccaattgtatatgatcttaatgagcatattcattgtatggaaggcactaatagaattctctcagtacagctgtaattgttggcaaaaagcattgttttgttttgttttttttcccaagacttttcttgatatttgctatttagtatgcaattacattgcagattaaccacttccaatttaaggttaggtgggagctcctcaattgcatggttaaatggattttgaaatatagaaatttcctttgcacttgcagtgaggtctgaaaagcactgcaggaactatagtttgaacttgcaaaatatatctattgcaaatttgtgtatggagggagatctttttattttaacatttgacaacacaggaagtatataaagccattattacttgtaattggaacagtgttgtcaaaatgactttattgcagtattttctcacgtaagcactgctttgccttgacttttaagtcagattcattaggaaactgtcaaatttgcagcaaattttaatttccaaagctatagtagtggttaaaggcatttctttttgttcagaaaatttcgtttgtgacctcgagctcaaaaaaatcacaataaaactctgtaaccactaagccattagacttctgtgtcataaggcaagtccagattttgtttccatttctgatcaaaatttacagaacttatgatggttaaatctgtgagaataaatgaagttcactggtgacattactggttcagtgatacatgataaattaatgttttccctactggttcaatgatacatgataaattgttttccctattgatgaataatagagtgaagtaccatagctttaaatagctatgctttcacaaactttgtaaatttgttcaactaaacctttttctggtcttcatttatttttgtcaccatcagttgcaacacatcttaacggattccacttcaggttatactgaattggtgctttctcaacttgggaaatattcttgcttattattattttatggagactcttcatagactctaactcttccgtgatttcaagcttggaattgacttcttgagaaaaaactaagcagtatcattaatatctgccagctcatcaagagccaaagaaaacctctacaagtcttttgccttgttttttagttgaatgttagtattgctcccagtgtcctcatctccagtagttattctcactgaaaggttaaacaagtttattttctctggaaacattggtggctacagccaaatacaatttaattaactccccatgggtaactggatttccttgcttggataataaatgagatacccggaagcttaatttgtttgcagctgtgtgtgtgtgtgtgtgtgtgtgtgtgtgtgtctgtgtggaaattctgctgtgatgagatactttgttttatattttcctgatttctctgatgataacttcctttgtcttgcgaatgtgatgagtgcttagtctggtagtatcgatgtatattgtatagtacaatggtttgccatctaactcgataacaaaacaattcacatactactttaaatgccttaaaagtgtgacatgcttctcttattttgacaggaagatcaaatgtggtataacagtatactatggtttttgaagcacttgacaagtcataactgtcactgcaatttgtagtgcatccagcaactgtgtaaagtgaatcattctgttacaacccctcaactctgctatcataatgcaaacacagctataggcaatgcacaaaggaatgagttgtgttccaataaaattttatgggcactgaaatttaaattttatataatttgcatttcatgaaatatgtttttcccttaattttattcaaccatttatagaagtaaaagccattatttttgcattacttttactttcaccattacataaaagtatgtatgggctgtggactgtacaaaaattttacgtaggcaatgggctgtagtttgccaattcttgctatagagtagtgctgcactacttcacctttccacaagactttttctctctatgaattccctatctaagtgaatgataccaccattcatccgtgcaactgttcctaaaatctggagtcattcttttaatatcattgggttccctaagttttagcaactctactactttgaattaaacctcccacctctttactgtaaacatgtaagtttaggcccttattacctcttcttgagactacactacccttttaacagatgttctttcccctggcatccctcttcttgaccagtttttacatgctgctagagtactgtctgagttcatttgggctgctgtaacagaatactatatattgggtggcatataaacaacagatttttttttcccacagttctggtgactgggaagttcaagatcaaggtgctggcagattcagtgtctggtcaaggcctgcctcctggtttataggtcatcttttctatgtaacctcacacggtagaaggagtgaggaagctctctggaggttgagtttataagggcactaattccattcacaagggctccactctaatgacctaatcacctctcaaaggccctaccacctaatatcatccacattgggagtaggatttcaacatatgaatttttaggggacacaaacattccatctataacaagtactctttctaaaatgtaaatctgattgttttactccttagacatattttgtaacggttttccattacctagagcagggttcccaaactcaaatgtaactgattaaaggtaattaaatggtgatttttttttacatacccttttttttttttgcatattgagtaaaagagaatattttttatttccatgaagatggctttctcttatttttcttaaagtatgtctttctttttgtctttcattttgttactttgaataaaaaagaacagcttagaaatacatttctctgctataacaaagacagcagcaaaaacatgatgaatggcatctaacactggacatcattctaaggatacagaaggaaatgctgggactatggcaactagagcatttgcccaacctggaaagggattccctgtgcaacctcaatgagttttgccctaagaatgtgggcccaaggaagtcacatttttgacttttcaaaagaagtcagaaaccagatttttaagtctgaaatcttcagatggctggttttggaaatggaaaaatattgtgagatctggaacctcaaatgatgatattatggttctctctctacttggctagattagggaactgaggatcagtaagacctgtcaagagacaggtctgagttcatgcctttagttaggggcagtgtcaggcctagaatgttgatctctcaactcctatactagtgttctttttattataccagactagctccaatttgttactgaaaaaaagcaagcgcacacatacataacacacacacaaacatgaagaagctaatactaaggattcatccaagtaagtgagttgatggaaaactgttgtccctttcggacatttccactaacagaatccagacactaatcacctcattcctgtagtactgagatactagactttctgctccccagtcctttctatatactatgaccagattaacatttttaaaaagacactacatcaattgtattactttcttatacaagaatctaatattgcttcaattgcctatcatatcaagtctaaaccatgctgagctttcaagatccatggaactttgctacctcttatttctcattactctctggaacacatcttcctttcactgtcccctatattcttcgtcataacaccagtatatctttgattctgttattatattatttcttctagaatagcctgttttcttctgtcttcttagtcatttttcatagtctaactcattaagacggcttctgagttctactgacctctcatttctgtggtacctactactacttagatttcaaatctcattcagtgatgtagttctattcactcagtgtttcatatttctttttggcatttggtaaatacttgtttgtagatgttacaaagtcactacagatttaggtcatgctactactcttaacaacagtatcctatagtgataataggaatttttataatagagtttgtcaggcagcagcctgtgggccaaatataccatgtagatggattttgttaaggagattttagaaattggaattaactgttaacacttaagaaatttctgatgaaaatacgctttctagccaagtggtggcttacgcctgtaatctcagcactttgggaggccaaggcggatgtgtcacttgaggccaggagttcaagaccagagtggccaacacggctactaaaagtacaaaaattagcctttagtccaaccaagttactcaggaggctgaggcatgagaatcacgtgaacccgggaggtggagattgtagtgagccaagatagagccaccgcattccaacctgggcgacagagcaaggctccatctcaaaaaaataaaaaatgtacaataccctaggctgcattcccattaaacagtcatctgtagttgtcttttaggcagggtatgaggtccccctagttttcattacttcttattatcttatatccttcaaatttcactcattaaaactcctgtttatctggttcctggaggtatctgaattgctaaagatttaattatgttcaaaattactgtaaagttgaatttatattactttttgaaaattaatattttaaaattaagaagttaattgtgaaaatttaatcataaaagtagtcaagagcacagttaactacttatgatctatatagtcactaatcatggttaaactgaatttttaattaatcagaatgatataagaaatcatagagatatggaatagattctctgctctcccatgaactgtgtatagccttcagcaagttgcttaagctcttttatatcctcattttatatatacccttaagatattatcattgtcattgattaagaaccacagaatagattccaaatgaaggaaatggggggcctattttataaggaaataatacaaattttaatatggaaactttcaagctcagttacctcataaggacttcactagcctaaaccaagatctgttggattttttctttccttatttttggccttgcagcattaaataaattttctaggaaaaatggcattccattttaaaaagtcatcatagtataataatagggccactaggccgggcgcggtggctcacgcctgtaatcccagcactttgggaggccaaggcgggtggatcatgaggtcaggagatcgagatcatcctggctgacatagtgaaaccccgtctctactaaaaatacaaaaaaaattagctgggcatggtggtgggcacctgtagtcccagctacttgggaggctgaggcaggagaatggcatgtacccaggaggcagagcttgcagtgagccgagatcgcaccactgcactccagcctgggcgacagagcaagactctgtcttaaaaacaaacaaacaaacaaacaaaaataataataatagggccactatattttttctaaggaacattattatgtcttagcattttataatatatgagttctataacatttaaaataactatatgcaaaagaattacataaatgatatataattttaaaattttaagataattacatttaaaaaatttttaaatgatataaaaaagtatataatttcagataactagtaaatgattgttggaatttttttttcatatggaaaaaaacaggaattgaactttttttttgtgacccagaataattttttttgagatgcaaattatttatatatacttacatgtatacatatattgcataatttatatttttgacattataaaatattttctgaactttaagttctgtactttaagtcctggggtacatgtgcacaacgtacaggtttgttacataagtatatatgtgccatgttggtttgctgtacccatcaactcatcatttacattaggtatttctcctaatgctatcccttcccctgtccccaccccatgacaggcccccgtgtgtgatgttccctgccctgtgtccaagtgttctcattgttcagttcccacctatgagtgagaacttgcggtgtttggttttctgtccttgtgatagtttgctcagaatgatggtttccagcttcatccatatccctgcaaagggcatgaactcatcctcttttatggctgcatagtaatccatggtgtatatgtgccacattttcttaatctagtctatcattggtggacatttgggttcgttcccagtctttgctattgtgaatagtgccgcaataaacatacatgtgcatgtgtctttatagtagcataatttatagtcctttgggtatatacccagtaatgggattgctgggtcaaatgatatttctagttctagatccttgaggaatcgccacactgttttccacaatggttgaactagtttacagtcccaccaacagtgtaaaagcattcttatttctccacatcctctccagcatctgttatttcctgactttttaatgatcgccattctaactggtgtgagatggtatctcattgtggcattgatttgcgtttctctgatgactagtgatgatgagcattttttcatgtgtctgttggctgcataaatgtcttcttttgagaagtgtctgttcatatcctttgcccactttttgatggggttgtttgtttttttcttgtaaatttgtttaagttctttgtagattctggatattagccctttgtcagatgggtagattgcaaaaattttctcccattctgtaggttgcctgttcactctgatggtagtttcttttgctttgctgaagctctttagtttaattagatcccatttgtcaattttggcttttgttgccattgcttttggtgttttagtcatgaagtccttgcccatgcctatgtcctgaatggtattgtctcggttttcttctagagtttttatggttttaggtctaacatttaagtctttaatccatcttgaattaatttttgtataaggtgtaaggaagggatccagtttcagctttctacatatggctagccagttttcccagcaccgtttattaaatagggaatcctttccccatttcttgtttttctgaggtttgtcaaagatcagatggttgtagatgtgtggtgttatttctgaggcctctgttctgttccattggtctatatctctgttttggtaccagtaccatgctgttttggttactgtagccttgtagtatagtttgaagtcaggtagcatgatgcctccagctttgttctttttgcataggattgtcttggcaatgtgggctcttttttggttttatatgaacttgaaagtagttttttccaattctgtgaagaaagtcattggtagcttgatggggggatggcattgaatctataaattactttgggcagtatggccattttcatgatattgatttgtcctatccatgagcatagaatgttcttccatttttttgtgtcctcttttattttgttgagcagcggtttgtagttctccttgaagaggtcgttcacatcccttgtaagttggattcctaggtattttattctctttgaagcaattgtgaatgggagttcactcatgatttggctgtttgtctgttattggtgtataggaatgcttgtgatttttgcacattgattttgtatcctgagactttgctgaagttgcttaccagcttaaggagattttgggctgagatgatggggttttctaaatatacaatcatgtcatctgcaaacagggacaatttgacttcctcttttcctaattgaataccctttatttctttctcttgcctgactgccctggcgagaacttccaacactatgctgaataggagtggtgagagagggcatccctgtcttctgccatttttgaaagggaatgcttccagtttttgcccattcagtatgatattggccgtggctttgtcataaatagctcttattattttgagatactttccatcaatacctagtttattgagagtttttagcatgaagggctgttgaattttgtcaatggccttttctgcatctattgaattaatcatgtggtttttgtcattggttctgtttatgtgatgaattacatttattgatttgcgtgtgttgaaccagccttgcatcccagggatgaagccaagttgatcgtggtaggtaagctttttgatgtgctgctggattcggtttgccagtattttattgaagatgtttgcatcgatgttcatcagggatattagtctaaaattctctttttttgttgtgtctctgtcaggctttggtatcaggatgatgctggcctcataaaatgagttagggaggattccctctttttctattgattggaatagtttcagaaggaatggtaccagctcctctttgtacctctggtagaattcggctgtgaatccgtctgtccctggactttttttggttggtaggctattaattattgcctcaatttcagaacctgttattggtctattcagagattcagctccttccttgtttagtcttgggagggtgtatgtgtccaggaatttatccatttcttctagattttctagtttatttgcgtagaggtgtttatagtattctctgatggtagtttatatttctgtgggatcggtggtgatatcctctttatcattttttaatgtgtctatttgattctgctctcttttcttctttattagtcttgctagcggtctatcaattttgttgatcttttcaaaaaaccagctcctggattcattgattttttttttttttttgaagggttttttatgtctctatctccttcggttctgctctgatcttagttatctcttgccttctgctagcttttgaatttgtttgctcttgcttctctagttcttttaattgtgatgttagaatgtctattttagatctttcctgctttcccttgtgggcatttagtgctatacatttccctctacacactgctttaaatgtgtcccagagattctggtgtgttgtgtatttgttctcattggtttcaaagaacatctttatttctgccgtcactttgttatttacctagtagtcattcaggagcgggttgttcagtttccatgtagttgtgtggttttgagtgagtttcttaatcctgagttctaatttgattgcactgtggtctgagagacagtttgttatgatttttgttctaggaattgaacgttaaaaaaaaattgcctttaaaacggtgagaaacacataccatcaaagtttttttgacaagaaattcatcagattttaaaaacaattttttaacttttctgaaaattgaagattcttcaagtaacttcatgaaagatgaaactgatcattacaaaatgcaaaacttacattgatgtagttgtgtttcagagaaataaaaatgttgatttgtttttaatattataagctacatttggtctccaaaatacagttagagcaaagaaaaaatagtatgagctgatgattttcctttagttgcagaaatgcatttctggggatggtgatgtggtggtaagctctaataaaaactgtccagtgtgtcatatttctggcttttatgtgttgcatacaaagcaccatcagtcaaatgagcaacacaagactaccatattaggcattataaacagtgacaaagtataagtagtgcaagtagtcatatttctagttttgaaatgcttaaactctagtagataaagaataatagaaaatgagcgataaaaaaggacataatttagattgtcaagagaaaacacagacccctaagaatttaattaagaggacagattatatttactttttcagcccctaatacagcttcttggacatatataagtgttcattacttaaaatgatctggaactttttctagaatttattatttattcagttaaacacttattgaaagctaaagtgtgtattcagcattgtactacccttgagatactgtggcagactgcttcctggtacatttcattgtgatttttttttttttttttttgttagtcactaattcagatacatagacagttgttacctagtacaactagctaacgtgtttggattataaattcattttggaagagcttacatctatataaaggaaggtacagacagtcctttgcacagttctgattagcacaatatctgtgtaactttcatgtaactgagcaaagttcagctacctatacagaaggaagagcctgtacttgcagacacacgtatatctggatttacccaactttggcacttattctgggcaagttattcagcttctgaattagctttctcatctattacagtcagataataatatctatttcacaagggagttggaaatagtacataaagtgatatccatataatttttaaaaataatgttatctgtagggttttttccccttttattttagattcagggggcacgtaatgcagtttgttacctggataaattgcatgatgctgaggtttagggtacaaatgatcccatcacccaggtactgaacatattaaatagtacacagtagtttttcaaccccaagtaattttaaatttccatttccaaagctaaaaatataatcgtttttagaaaactttatcttgtattcagagctaaaaccaatcaaagactataatgctgtttattgtactattttaaccaaaccatgtggtgaatattaagttatggtagctgattatatttttagaagataatcacaacaatgtctcttgccccacatatttttttagaacttcctaccactcattaagagttggggtctaattctcctattgaatctgagcacacttatgtaaccattagaatgcagcagaagggatgccatgtgactttcctagcttaggtcataaaaggcaatgctgcttccgctctgattgttggaataccagcctgcttggagccctgagaaatccgagtacctggaggttgctgtgtcaggaagctaagccttgtagaaaggtcccaagtctcaggtatcagatttcaggtcagaaatcctagtctttgagtcctttcatgccagtcaccagccatgtgagtgaatgaactgttagatgatttagatcatgccagcttcagccactgagtcactcccagtcacccctagcctttgagactctgcatcaaggctgtagattttgtgaagtagagaccagccatcttgaatgtgccctttgtgattcccgattcatagaatctatgagcgtaataaaatggcttttgttttatgccagtaaatttggggtggtttgttatataaaaacgtttttatataaaacactgaaaagatacatttcctcagtgagcaatagattgctattgaaattcatcaaagtaggaactacctgctgaataaatgttaactgagtttttctttcatttcaaatgaagatagcctaaaaagacatttgcctagagaaatttggtttctttacttgttctttattctgacattaattgtcttgaagagatattaattgactgttctagcagccaggaaagaaatgtatatgcttaaagagtgctgtgggttttaacatagctttatgataaattttaccagtttggctaatgaaaaatgtcaattagtacttttaaattattaagaatagtttccacaaaagtttagtatttttattaacacaggagcctaataaaaccttgtaggaacaaaggaatatctgtactgatctctccaactgaaaattgttatccctgatactaattttaatgttaatgtaaaatattagcatcatcactagtatatttggcagttgtttgagtcatctttcctgtcacttcttagaagacagtggattttctaggttgatcaccattgaataaaattataactgtcataaaattatcaagggatttctgttatgtagtacatattatgatttcctaaaataatataataattataataatgggcactttttattaatatattaatatttataataaataattataaataaattataaataatttaaataaataataaatttaaattataaataataaataattgtaaataaacattataaattatttataatatttatttataaatatattcatatttattataataatgggcacattttattaagattattgccatggctgggcacggtgggctcatgcctataattctagcatgttgcgaagctgaggcaggaggatggcttgagctcaggaggtcgagaccagcctgggcaacatagaaagactctgtctgtccaaaaaaataaaattagctgggcgttgtagtcagcacctgtggccccatatattcagcttgctgaggtgggaggattgcctaagcccaggaagttaaggttgcagtgagccattattgtgccactgcactccagcctgggttacagagtgagaccctgtctcaaaaaaaaaaaaaaaaattattgccgtgagtgccaggagccaaagtattgtaggcctgtcgcatccagacacaatgtatgtgattaggctctctctgtgtagagcctaatcacatatacacagacataattcttgaactttatgagaataggtctttaggcattgtgtgaaataaaattttacaaattgtattttgctcttatttattatagtttaatattgtagttgtgaagatcatctgtcagattcttcaccctctcatcaaacatgacaagtaagactagagtgtttctatttcagactaaaatagagttttaattccatttaagaatgaatgaggccaggcgcggtggctaacgcctataatcctagcactttgggaggcctaggtgggcagatcacctgaggtcaggagttcaagaccagcctggtcaacatggtgaaaccccgtgtctactaaaaatacaaaaaattagctgggcgtggtggcaggtgcctgtaatcccagctgtttgggaggctgaggcaggagaatcccttgaaaccaggaggtggaggttgtagtgagccaagatcacgtcattgcacttcagcctgggcaacgagagtgaaactccgtcttaaaaaaaaaaaaaaaaaaaaaaaagaatgaatgaaaaattactgcttagaaaatttttatcacatttctaaaatagagaagatgacttagagtgaaataaagtcattgtttttagtatagcccattttaataaaaatatttcttaatcaagacagtttgtgtcataatttctaaaaaaacatgccagtgcaagtaactcaaaagtaatgtaggttttcaggatttactaaattttcactatagtgagtagtatgagtatcctagcataatttcctgtcctagaggaattttcaatctaatagtagaactatacaagtagggttctatgtacctagaactataaaactaacaaaatgaaaaatacagaaaaaataaaactgtataaaattctacaaaaataatctcataaatagattacaaacttattgatgaagtttaattttgggatttaaccacttggtgtagagttcaaactgcttgactcacacataggacaggttgattacattcatataagcccttatattttatgaaatcttgtaatgaattataattaacctggaacaaaagaggtgtatctagtggatagatgtgtgtgtaagtggtgaataggcacagagttacaatgtcattgcaacctggagagtcatactgggagcaaagaccatgtatatgaataggtatgactacatgttaaagtaataaattcatggattaaggtagaagttaggtgtgtaacatttatgaaatatagtttggagttttcattaaatagaatagtttttagctcttttgtttctcttcaaatattagaaatatttctaattatccaagtactgcatgaattgcctttgaaatattgcacacatgcacctgaacagttacttttttgctcagatattttttttttcagatcatgtgtacataatgtatgttcacaaaacatatttagtatttaggtacattcctgttagatcttgcatctgtggaacttcatcgtggaaactaatttatcaaagtagcacattcacattagtttcatattctttttaattttcaattttattgggaccaagtaataattatgaaggtagtgataaatgattaaactttaaatactttttctaagctctcagttttcttatttgtttttcttttttttactataagttttagggtacatgtgcacaacatgcaggtttgttacatatgtatacatgtgccatgttggtgtgctgtacccattaactcgtcatttaacaataggtatatctcctaatgctatccctccccgctacccccatcccacaacaggccccagtgtgtgatgttccccttcctgtgtccatgtgttctcagtgttcagttcccacctatgagtgagaacatgcggtgtttggttttttgtccttgccatagtttgctgagaatgatggtttccagcttcatccatgttcctacaaaggacatgaactcatcgttttttatggctgcatagtattccatggtgtatatgtgccacattttcttaatcccgtctatcattgttggacatttgggttggttccaagtctttgctattgtgaatagtgccgcagtaaacatacgtgtgcatgtgtctttatagcagcatgatttataatcctttgggtatatacccagtaatgggattgctgggtcaagtggtatttctagttctagatccctgaggaatcaccacactgacttccacaatggttgaactggtttaccgtcccaccaacagtgtaaaagtgttcctgtttcttcacatcctctcgagcacctgttgtttcctgactttttaatgatcgccattctaactggtgtgagatggtatctcattgtggttttgatttgcatttctcttaaggcctagtgatgatgagcattttttcatgtgtctgttggctgcataaatgtcttcttttgagaagtgtctgtttatatcttaacagcaagcatctgtagccgcagcagcagtgaagagaagcatgattttttttcatatcattagaagtcagtgaaatggggaataactggagaatttgattataatacagtagtccccctttatccacagggatatgttccaagatcaagaggcatgatttttgtgcttaaacttttttagcttgctaagaagtaagataatttgaatggtgactgaatatgtgataattatacaaggtagccctttttttactgtagatatgtcacctacccatgaaaatgggacaacttatttaattctcagcaatcacaaaattctaaaatcttttggaataaatttaacattaaagaatctatataaaaatagaaactttcatgtttatcaaggtataaacaaaatgtgggagcctagaaaaggaaggttcctctgactgcaggaatacagaaagcttcatgcaagacttggcatattagttgacttcgccaagtaagtagccatgctagatgtggaaaatgcacagaaaggaattttagaaaagaatttaattctcacaattgtgaaaatgaaagtgtgcttgggaaaaagccaataatgtggtgggactgacacacatgatgttgtgtgagaaagtaatgggagatggcataatgtgagttgtaaaagtttctgatcggtttaggaccagctctggtaaacaaaaaaaaaaaaaaaaaaaaagaaagaaaagtaggaaactgaaaatacaacatagtaaaactgaaaatattataatttttaaacacagtcctttccacttgacatgctaacagaaactactattcctacttcattagagaagcttttaaaaatagcttcattctgtcagatactaaaccctttagataagtaaaacataatattcaagagagattgctattatttccagctgctaagccaggtgccccaaattgacttaatgccattcattttgagataaacttgaaattcttccattcatgcattggctgtattctaggtacttgaaaaccacattagcacagaaatatttttttttttggatttgatgtggatagtgatgctttcaaagtaaagctttgttactagatagttatgtgaaaataatagatacagaaaaaaattgagtgacatttgaagtgaggtaaaaatgtcttgaacttttacaagctcagttagcagttcttgtgtacttgtctcctgtcggttttatcatcagcaatggtataattgtccaaagataacaaacacatatctatctatatacccatgtatctacttactggcatatagtaaagtgatagaattgattaacatttaaaagtatgaagttttagatccaataaccttgaaaataaagctaccatttctgaataatattgtgaggaagataaactgaaaaatgccaccacaaataacataaagaatttcatgacttcctagtttaacatgacactgtcttgagatttgttctttgggacagtcctttcttcacagtcaagtgtattctttgttgttggtgatgatcttaagtacttttatggtcaaattatttaaatattaaaacagcatcactttcctcattagtttttcttagattgatgttaagaaaggaactgatagctaaaaatttaggtcttatgaaaactcttccattgcagcaagtacttacagaccagtaaataatttgtttctggtttatagaagagaggttggagcataaagagcctctggtgcctaagataaaagaaaaaaaaggcttggcaaagtttgaaggttttagtgggaaagtatagctgtttgtctttaacagagacttttgagaaatgcgaggaatgatagttagctgttcacggttaccagaagttgcatcaggttttatccaaatgtatcaaggcctaaaatgtggtaattctttatattgatagggacataaagcaagtggtctgtccagctgaataaaagaagggaggacagaaggaaagagcataccatcctaatattctgaagggcatgcatatattattcaggaagagaagaggctctgtgcacaactggggtcacactaatattaaaggggcagatagagaaggaagatctattgaagaagaccaaaaacaagtgtttagactgatgtttctaagttaagaggtgtttcagaaatggaaaaactgtctattgctacagagatatcaaacaagaggattgagaaaaattcattggctttgtcaagatatcatttaaaacctttgacagagtaattttgataggcttttagaggacttggttagatcaggttttaaggagcgattgagtgggtaagaagtgggagactcagaattttaatgaccaagtcaactttgctttaaccctttgaagatgtcacatatttcacaagacgaactagaccatatgttgatatataggaaagaaattgttttaagaaaaaattttattttatttgttaatacttctccatttctatctctacttactgcctcattaccagccagaggctgacaaattttcattagaacaatttcagtgcttttaaggaaatgtaaaatacagctctctggaattacacaaaaagtaatttggatgctaaggatttactactgaaatttactgtcatggtttgaaggagtacaaaaataatatcctctgtttcttacccaagcttagaaccactggagatataagcatatgagtcgtctgctagaatttaaaatatctgctttaaaattaataaagtctagagttaaggcctctatttgtagagtcacaatgggattactagtaatttactgctgaattatacatatttactcattttgtcactgtacacctggacagccacaggtgtagaacagaaaattcttgttgtttctaaaataacaggaatgcagaaggggttgagccatacatgtccagtagtcctcagccttaatcagataaatcagataaatctttcctcttctggaaaatggaagctttcatattgtttcggcttagcagggcaactaacctttaaggaactgccaggtgtccagttttagtatatcagtgaatatccgcaattatctgaaaaggctgttaaaatactcacgtgttttccaactacgtatatattgagactaaattttcttcatctattcaaaccaaaacagcatattaaccaagattgaatacagaagaagatacgagagtccagtcatcttctgttgaaccacattatggagattttttttttttccttttttttttttaagagatagggtcttgctctgccacccaggttagagtgcagtggagcaatcctagctccctgtagactcaaactcctcaggcttaagtgatcctcccactgcagcctcctgagtagctgggaatacaggcacatgccaccatatgcagttaatttttttatttttatttttcttagagaagaggactcactttgttgcccgggccggtatcaaactcctagcctcaagtgatccttccaccttggcctcccaaagtgatgggattacaggcatgagccaccgggcctggatgaaatttctaaaaatgtaaaacaatgccttatgtaagtgataggttgatgggtgcagcaaaccaccatggcacatgtttatgtaacaaaactgtatgttctgcagatgtaagccagaacttaaagtataataaaagaaaaaaaaaaaacaatgctattcttcttgctaaatttttttgttaggaaataatttttttcattaaaatgctaattatgttaatgtgcagtaggtttataattgttacatttaagtaaattactaaataattttaaaaagtctcagttttgattttgtagtatgttaaatgtctatagcaataatataaacaaaagctctttgggattctcaataacttttaatagtgtaaagaggttttgagaatctgtgatctagaggaattcacatataatttaggaagaaagcatagctttataatccaaaatatgcatgttagggcttaaagcagtactttgatgtgaagtatttttgaaatgacagtgtaagttttgtagttatcacactttgtattatttggaatcatattattttgaaatttttctaaaccttcattttttatgtctttaatgtacaacagaggaagtgaacaatgaaataaaatgtttgtaaaactatataattttttatgaacatttaatttttctaagccatagatgctttcctgaacaagctcaataagttataagaatatggaaaaaagatgttctttgataatatttggaatattcctggtatcttacacatagcagaatgaatatttcatatctgagttaagtgaacaaagtgcatttaaaatttttttaatagtacagtctaatgccattttggaatgtacgtggaggttaatttgctattataggaagctctccagtttagtggtaactgtttatccttttgtcatgtaacatatggtggtcataaggttgagtttctgatttttttttttctttaagcagataatctcagtgataccttgaagaagctgaagataacagctgttgacaagactgaggatagtttagaaggatgcttggattgtctgcttcaagccctggctcaaaatagtaagtttcattatgtttactcaaattccaaagaagaaaatcaaatcagtagtcattcagaaactggtatgtagttaagcacataactttgtattcatataacttgaattcttttgaatcatatccctgaatactgagattgttttacatgttctaccctcctacttccctccacgcccccgcaagatcctcaaagccaagctgataggcaaagaaaggaggaattgatgggtggtgatgacattaataccagtcccagagagaggccattgtttcatttctaacagtcaagcatcgtagttgtttttcttagcacctacatctgtgctttaaaaatagattgttttatatgtggggagagtggggagggagagagaggagaaacagagggggagcttaaaacacttaacatttttttggaatcttatcatattttaaaataattgtaccttaaaataatatgtatgcatagataaatttggaaggaaccattagaagtcatcaaaaatcttttgaaattggggtaggattttatctttgatgtgataaataatgctagagatagaaactgcacagttcttcattgaccattgtgttgcattttatttatcctatttctagtcactaatttctgtattatcaccattaatagatcagtatagagtgattttcatttgttatcttaattctgcttggttgtgctgtggttttttctgtacttgtttttaattatgctcttgtcctatcctgaaactaattatgtagctgacaaagaatggaggggaacgtatatattgttaaggttttaattgtaaggtttcaacacttattgatatatgttttttttattttttagtaaaccttgattagaaaaatctaaaataattgattgcagtacttttcatcaaaaaagcacattttagagctagcttttaaaattatttttcagtaattattttagattacaactgtcatgctgtttaatcatagagataacaggaagagatttgaaacaaggagttcaataagagcatccagataaggctcaaaatggtaaagaaaaaggacaggaaaggagaacgtctaagcctgctatccattttagtggacacatgtggctatttaaatttaatacaagtaaataaaatgtaaaaggaagttccttagtctcacttctcagtagttatatttggcagatgaccactctcttggggatcacagatataaaatattcccatgatcacagaaaattcttatggatagcactggtctagaaactaggaagaaccacacgatgacctgatttttttttacatgtgcctgtataggcagctttacacagtaacataattaacctaagtaaattgagtatctcaggtatatttttttgaacagttgttttattataaccttcgtctgttttcagcaacactttttttctctgttagacagtaaacttttaaatagaccatttgctttagatactgaaggacatgaagggtcatattcttggtcatctgtagaggttgcccatttgtctcctaggaagactggaagacaaagagatgaagttgaagggaaatgaagaaaaaagggagtaaaaagtgtatagcttttaaaagaacagatttaagaaacactgagaagttcataattattagattaaattagcttacattagaataagcccattgcggacttattcactgtaccttttgttgaaaatggtcttgtgaaattgtgtatcacaaaatgttaaggccacgtaaccacaaggtattaaaacaataaactctcaccaatttaactaatgatgccccaggaagggaacaaaaggaatgtcttgttaacaatctgaaacaaaatttataaatgccctcaagcctaagactactgacaaagaagaattggaaaaaggagttcatgcagatgttcagtctttgacacctgtcattggatcacttactgtatgtttagcactgggctggggattatagccactatctaatctttcctatagtcccatgaggtaggtattattatcaccatttaaaggatgaggtaacagattaataagcttatttgccttgctctggaagaagccagagtttggatttgaactcttgatttacaaaataaaaaattgtaatctgaataaagtgaagctttttgctgagttcatgtaatgtgaaatcattccaagaagctaggttttaacattgtgttttaaatttttgttttttctttaataaaaatagctctaaatttttattaaagtggataagcctgtttttcttgaactataaagtgatatatgtattttataggcatttattgatacactttataaagtcagcatatgcctttttaacaagaaaaagtaaaatatattagtgagatgttaattttctacagttcttccttgaataaggtgattgagccattgctacttctgtcctcctaaatgtaaaattataaaacatttaacttagaagaatctgtacttgctttttaaacaacaacaacaacaacaacaacaacaaaaacacagagagcttctcgtttcataattcttccttagtgtcaggtgttttaactaaaaataacaactgtaccataattgcacctgatcaggaaagaaagatttctccattctgtacaaatataagatggtaatgtatgtaatggaaatataaacaaaattttattttacagtctattaccctgttactggaaaggttatctctgaaaggaacaaaataatgcttttgaaatttttacactgtgtgatttagtgcatttgaattgcatattacaaatgactgtaatctgaaattagaatttttactttgatgtatggctttagagtggttttctttttttaccattggcagtatttctctctgtaacgtttatactatatgtgtctatcttaagagacaagaagatttgaatacttactagattttatgaaaacattttgtttaagcaagcattttgtgtaaatctatgatctaaattaatataaagtcattcattcactcatataaatacatcagatctcagttttaaaatgtttttagtaaatgtgtgaaggctaccagccaagaaatcagcttctgtttattttggtctcttttgattcagattatagttagaagattctcagtaaatgcttatttgattgtagtatggttactctattttatggttatttggaaatgtaaaacaataggccacctattttcatccccaaacattaagacaggaattgtctttggagaatgtggcatctaaatcaccttgcaagagaaactattagtttaaattaaagtcccaaaggcaagaaaaattaacattctatttgtaataaaaattctatccattttattccattttgaggatgaagaccattttgtgttgccggggggaccataaagtgtgccatacagctttaaactctctccctgaagaagtaagctgtcttcccctgcctcgttctcttttttttttttttgtatttaacttagtttcttgcttgatggcaattcccatttcatacgagagtcacgtaattgtttattttttatagaacaactctgtgagatactgcgtgtttacttgtctttaaagaaaaaaagcatttaatgtctagttccacatctctaatcttctatgataatattcactcacatgttgaattcttgctttattttctagccctaaggtaatttgctagcccttgttctttatttcatttgttgtattgatttttggctcccttctaggctacaatgctaagcatacgtaattataggcaaacttcattttattgtgctttactttattgagcttcacaaatactgtattttttacaaattgaaggtttatggcaaccctaagttgagcaagtctttcagtgccatttttccaacaccttgtgcttactttgtgtatctgtgtcacattatggtaattcttgcaacatttcagacattattattatatctactttggtaatctgtgtcaatgatctttgatgttactattgtgattgttttggggtgccgtgaaccatgcccatgtatgatggtaaacttaattgataaatattgtgtctgtctgactgccccaccaactagctatgccgtaccccctactccccatctctattcctctcctcaggcctccctattgcatgagacacaatgtttaatttagaccaattaataatcctacagtggcctgtaagtgttccagtgaaaggaagagtcacatctctctcactttatatcacaagctagaaatgattaagcttattgaggaaagcatgtcgaaagcggaggcaggttgaaagcaaagataggccaaaagctaggcttcttgagccagttagccaagttgtgaatgcaaaggaaaagttcttgaaggaaattaaaagttctactccactgaaaacatgaatgataagaagtctaaacagccttattactgataggaagaaactttgagcgctctggttagaggatcatactagccacaacattcccatgtcctaatccagagcagggctctgattgtcttcagttctgagaaggccgagaggtgaggagactgcattaagaaaagttggacactagcagaggttggttcatgaggtttaaggaaagaagtcatcttcacaacactgaaagtgaaagatgaagcagcagctgctgatggagaagctgaagcaagttacccacaagatctagctaaaatcattgatgaaggaggaggctgtgctaaacaacagattttcagtatagatgaaacagcttggtattggaagagatgccacctaggacttttataactagggtggagaggtcaatgcctggcttcaaaggacaggctgactctcttattaggggctaatgcagctggtgactttaagttgaagccagcattcatttaccattctgaaaatcctggggcccttcagaatgatgctaaatttctctgcctgttctctgaaaatggaaaacaaagtctggatgacagcacatctatttacagcatggtttactgaatgttttaagcccactgttgagacatactgctcagaaaaaaaagatccctttcaaaatattactgctcattgacaatgcacctggtcacccaagagctctgacgtacatggagataaatgttatttttgtgcctgttaacacaacatccgtggatgaaggaataatttcgaagccttattatacatttcataaggctatagctgccatagatagtgatttctttggtggatttgggcaaactaaattgaaaacctggaaaggatttaccattctagatgccattaagaatattcatgattcatgggagaaggtcaaaatatcaactttttttttattatactttaagttctagggtacatgtgcacaacatgcaggtttgttacataggtatacatgtgccatgttggtttgctgcacccattaacttgtcatttacattaggtatttctcctaatgctatcctttccccagccccctaccctacgacaggccctggtgtgtgatgttccccccgctgtgtccaagtgttctcattgttcaattcccacctatgagtgagaacatgcagtgtttggttttctgtccttgtgatagtttgctcagaatgatggtttctagcttcttctgtatccctgcaaaggagatgaactcatccttttttatgtctgcatagtattctatggtgtatatgtgccacattttctttatctagtctatcattgatggacattcagattggttccaagtctttgctattgtgaacagtgctgcaataaacatacgtgtgcatgtgtctttatagtagcatgaaaatatcaacattaacaggaatttggaacaagttaattccctctattatggatgactttgagtagttcaaaaccagtggatgaagtaactgtagatgtggtagaaatagcaggaaaactagaattagaagtggcacttcaagatgtgaccgaattgctataatctcacgataaaacttgggcagatgaggagtcacttcttatagatgagaaaagaaagtggtttttttttttatttgctttggtttttttttttgagacagagtctcactctgtcgcccaggctggaatgcagtggcacgatctcagctcagtgcaacctccacctcccaggttcaagtgattcttctgcttcagcctcccgagcagctgggactacaggcacgcgccaccatgcctggctgatttttgtgtttttagtaccatattggccaggttggtctcgaactcctgaccttgtgatccacctgcccctgcctcccaaagtactaagattacagacatgagccactgcgcctggcctcgaaagtggttttttgagatggaatctactcctggtgaagatgctgtgaacattgaaatgacacaaagaatttagaatattacataaacgtagttgataaaacattgacagggtttgaaagaattgactccaggttttaaagaagttctataggtgaaatgctatcgaacagcattgcatgctacgggtatcttttgtgaaaggaagagtcaatcaggatgataaactttgtcttattttaagaagttgacatagccacctaaccttcagcaaccagcaccctgattaggtggtggttagtcagcaacattcagcattgaggaaagatcatccagcagcaaaaagttatgacttactgaaggctcagatgatcgctagcatcttttagcaataaaatattttttaaagcaagctgtgtacattgtttctttagacataatgctcttgcacactcagtagactacagtatagtgtagacagaactttttttttttttttgaggcggagtcttgcactgtcacgcaggctggagtgcagtggcacgatcttggctcactgcaacctcctcctcccatgttcaaatgattctcctgcctcagcctcctgagtagctgggattacagatgcccaccaccacacccagctaattttttgtatttttagtagagatggtgtttccccatgttggccaggttggtcttaaactcctgacctcaggtgatccaccttccttggcctcccaaactgctaggattacaagcatgagccaccgtgcccagcctgtagacataacatttatatctattgggaaaccaaaaaacaaaaaacaaacaaacaaaaaaaactggtgtgatttgctttatagtcactttattgaagtgatttggaaccaaactcacaatatctctgaggtatgcctttatgtacagaaggtgttaatctagattactccatgagtcttgtctagcagtaaaaacttttgttgtcatttgctttagtcagctttatgcatttactatttttgaacagacttactttcaggtagcaaagttacttcctaagtaagagagttcttattatcaactgttttttttttcctgtatttgcaatctctgaacatactcctgctgttttagtagagatgaaaaattattattttattctttcatagtagtatcttgaagagatttttacctttttatctagtgttatcaaatgttccacagaagtgatgtatttcttttgcgaactgaattcattattattatttttttttaccttctttactttttttcatattgtatacctcttttagtgattgtgttcattgtccatgagggcttagcactggtgctccttatgaagtagtgaagattcagtttttaccaaataaagacagcatttggagaatataggagattctcaactaaagtgtcaactaaaaagacattgacaattcctgatgggttgagactcctggattgccataggatggtggtggcctcctaaatctgtatctttccatgcattctctaaaagtccacacagatccacaaagagataaaaccaactaacaatattctttgtctccagcataactaggagacagacttcaaattattacagagataaataaatatccaaatctagcctactcagcttcagagaccactgcagggagagttaagactccagagaccacatggacaagaggagagggaaatggggaaccaggagcccaagggtaatagcacacaatgaaaattacctttagaaagaaaaaaattcctaccctagtaggaaaatagtgcgatctggtcttagattagattctaacattggctacttaaaagtgcatggactccaggtgacaggtcaggaaagcaccactttggggatggagttgttcacctttatatacttggtgatgaaaagaaagaagcaagagggagaaatgaagtgttctgtagaaataaggaaaccacaaaatcagaagacatactaattaccccactttggtctcagttcagaagagggagcatttgaactaaaaatcctggatatttatcccaaattgttgcccttactgcattcaatttttattactagtcaaggaaaataaaaaattatacactgaataggaaatttcagataagatacatacataggtgctacaaaaaagaaagcagaaaataagaataaaaacattttagctattaaaaattttccatctaagccatctgtgttgcagttatcattaacagaacaccatgacctatattaaatattcttaaataagcctttgcagatatgaagagaagaaaccttcaagttataaattcagaaacttagaaccaaagtgaacaccaggaagatgtgaaactagagttgaccagaagaaattgaagaaaatgacaaaattgctttaaaaattaagactaaatttcaaggtgcccaaggaagaatagaggtgattgaaaatttaaaaaggggcattgaggaaagagatgcaaacaggcaactgagaagacaaaggatcagagaaaagattataatacagaagatagtcaaaaagatccaacatacatgcaattggaattcagaagaaggaaaacaaaatggtgaaacagagatagtatttaaaagtacaaagtttctaaaagtaaaggaagaccagaatctgttttttgaaagggcccaccatatacttgtgaaaattgacctgaaacagtcaactgaaagacatagtgtaggaaaacttttagactttaaagataaaaacaaatacagaggaaaaaatcctcaaggcctccatgcaaaaatattatttacaaaggaaagaaaggccaggcatggtgacccacacctgtaatcccagcactttgggaggccaaggtgggcggatcacttgaggtcaggagttggagaccagcctggccaatatggcaaaacctcgtctctactaaaaatacaaaaattagccgagtctggtcatgcatgcctgtaatcctagctacctgggaggctgaggcatgagaattgcttgagcccgggagacggaggttgcagtgagcagagattgcgtgactgcactctagcctgggcggtagagcaagactcagtctcaaataaaaaaaaaaaaaaagaggaaagaaagtcagattagcatcagacgtccacatagcaatacagaattcaatagtggtgcagtattttcaggtaactgaaggaataagaattttatattgaaccaagctgcccagtaaaaatcaaagctgtagaagaatcctgttaaagatagaagaatcaagggaatactgtactctttgccttctagaagaatcttcttaaacttgcactgtttaatacagtagtcactcttcaacatggctgttgagcatttgaaatgaagctagtctaaattgagatgtgttgtacatctaaaaaacatacaaaatttcaaagacttagtacaaattaaaaaatgtaaaatagtcattaatagttttagaaatattgattatatattaaatcttattttaaaaattttgtgaaatatttacaaatgctttgtttctgctgaagctttataggccagcatttcttggattgtgggtagtagctgatcaaagtgcttataagacttgggccagtcagtgtgatatgatggaaaatgcaggttagaagaaaataataagtaaattaataataatataatataatataatataatataatataatataattggggtattcagtataggaagagaactttttaaaaaaaattattttaagttctggaatacatgtgcagggcatgcaggtttgttacataggtgaatgtgtgccatggtagtttgctgcacctatcaacccttcacctaggtattaagccccacatgcattagctgtttatcctgatgctctccctccccataaccccctctacagaccccattgtgtggtgttccccttcctgtgtccatgtgttttctttgttcagctcccacttataagtaagaacatgcagtgtttgggctgctgttcctgtgatagtttgttgaggataatggcttccagctccatccatgtccctacaaaggacatgatctaattcctttttatggctgcatagtattccatggtgtatatctaccacatttccagtctatcattgatgggcatttgggttggttccatgtctttgctattgtgaacagtgctgcagtgaatgtacacgtgcatgtatctttataatagaatgacttatattcctttgggtatatacccagtaatgggattgctgggtcaaatggtatttctggttccagatctttgaggaatcagcaccctgtcttccacaatggttgaactaattcacattcccaccaacagtgtaaaagtgttcctatttctccacagccttgccagcatctgttgttccttgactttttagtaatcaccattctgactggcttgagatggtatctcattgtggttttgatttgcatttctctaatgatcagtgatgttgagcttttttttcctgtttgttggccgcataagtgtcttcttttgagaagtatatgttcatgtcctttgcccacttttaaatggggttgtttttttcttgtaaattcgtttgtagttccttgtaaattctggatattagacctttgtcagatggatagattttgaaaatgttttcccattctgtaggtggtcagttcactccgatggtagtttcttttgctgcgcaaaagctctttagtttaattagatcccatttgtcaatttttgcttttgttgcaattgcttttgatgtttttgttatgaaatctttccccttgtctatgttctgaatgatgttgcgtagattttcttctagggtttcatagtttggggttttacatttttaagtctttattccatcttgagttaatttttgtatagggtgtaaggaaggggtccaggttcaattttttgcatatagctagccagttttcccagcacgatttattaaatagggaatccttgtcgaagagcagatggttctagatgtgtggtcttatttctgagatctctgttctgtcttattggtctgtgtgtctgtttttgtaccagtaccatgctgttttggttactgtagccttgtagtatagtttgaatttgggtagcatgacgcctctagctttgttctttttgcttaggattgtcttggctatacaggctcttttttgattccatatgaattttaaagtagtttttttctaattctgtgaagaatgtcaaatggtagtttaatgggaatagcactgaatttataaattactttgggcagtatggccgttttcatgctaattgattcttcctatccatgagcatgcaatgtttttccatttgtttatgtcttctctgatttccttgagcagtcatttgtagtttggtagagaacatttttaaaggaaccttaggttcattattctagggttacattctaaggagaaggctgtatatagggtctaaaatatgtcctatgtgcttaatctaaaagcagagattaaaaggagagaacagtgtgtatccaaatatattcttacctaggagtttatagaaaagggagcatggaaaggcttgaatctgggagagtgagaaagaccatcttaaaatcaatctctcacaagccatgagattagtaacagaaacaagatgtataacagtgatactgggtgctgtttgccttccgatatgctctgaagcactgtactttataaaaggcaaaaaaggactctcatgttgtgcagttgccagaaggatataaatctccattggtatttgtagttggtgattgaagccttggcagaagatctgggtttgctaacattagctaatgaatgttaccatttttgcttcttaagtttgctacatttgaaaaactttttatgttcctaacacagagaaaatgtgtaagagagaaatgtgatttgaaatgatgctgtatgccaaatacatactgaagaagatttgccagtctcagtatttatagtaccagtactgatttactataactaaggactacactttaaattatacttggggaaaaagagatgaatttgttctgctgtgtctttctaacattatttttcatcagggttccatgtcactgcacctatagccagctgtgggagtagtctgtggacatataattgattgaagttaactgtcttctctaatcgtataagcagtaacccaatgtgtccatccatttgtgctgttataacagaataccacacaccggctatattacaaatagtagagatttatatttctccctgttatggaggctgagaagtccaagatcaaggtgctggtaggttcagagtccggtgacatgccatacctcattgatggtacctttttgatggcaccttgttactgcattctcacatgacagaaggtggaagggaaggagagcgagagagcgaggcagctctctgaagcctcttttataatggcattaatccattataaagtcctcacctcatactactgtcatattggggattaagttttaatacatgacttttgggtgggacacaacatttaaaccacagcacccactatgtcctgaatgtgttcaagaatataagacatgtaaattggcattttaattgatacaatgaattggaaatgaattaatattagtatctgaataagaattatgtattctcaacagaaagctagtttgatacaaagaaaatagctttaagtaataaatagattagataaatgtgttttcattatctttactgtgattgtagatgtttgaatttgaaattaaaggcaagggtagtatcatgctactttttacttcagtagtgcttgaaagtccaagtgggttctattcgctctagaaagctttcttacatcgtctaaatgctttcatttttacctcttttcagattttctgaatacccacttggcattgtaaaacagagaagattaaggtttcatcattaggtttcatcattaggtatacattggaatctataatgagacattttttggaaataataaaatttagtgaatcatttttttctaatggaagcttctttgtaaaatatatgtcttcttattataattaatttatttgtactgtatttaaaaatttattttaacatatggtacatgtgaggacttaattgtattttttttttagataatcaattttcctaatacaatgtgttgtttaatctgttccttatacatatttctatcatggaataaccatttagtttaatataattgcatcagtgtctgagtttttttctgtcccattaatctgtttgtctaatattgtgctgttaccttaccatgctattttaattatggtagctttatggaggaagtttcctattataaatttatttttgaaaaattgttattgttttcatgggtttgttatatcagaaattttgtaaatactttgtcatgtttctgaaaaatcctattggaattgtaataagtcataaattaatttggggagaattgaaaacttctcaatattttgtctgccaatctaagggcatagattgtatcttctcttattctaatcttctttttatgtctcagtaagattaggtagtttggttcatatgctttccatacattactttttaaaaatattcctttgtattttgcatttttgttgttgcgtatggattttttctgtataacttctaagtgattattgttagagattattgtgaaagatgtcttgatttttatatttttgtatgtattcagccaccttctgttcttcattaaaatgaatttttagctaattctcttaggttttgcaatcagaacatctacaaagtgatacttttgtttcctcttgcccttataactaaagccgacttactgtattgggttaagcttccagtgaaatagtaaataacagtgatatggttagcaccatattttagtttccgatactgatggtatggcccttctgatgtttcaccattaaatataacatctcttgatttttatgtaaaagttctttttcagtttaagaaaataataaggccgggcacagtggctcatacctgtaatccctgcattttgggaggctcacgcaggaggattgcttgaagtgaggagtttgagactagcctgggcagtaaataaagacagcatctctatcaaagaatatatatatgtgtgtatatatgtgtgtgtgtgtgtgtatgtatgtgtatgggtgtgtgtatatgtgtgcgtgtatataggtatatacatatatgtgcatatatgtgtatatacatgtatatatacacacacacccacacacatatatatacacacacacactatatatatatatatatatatatatatatatatatgcgccaggcatggtggtgtgtctctctattcccagctatgtggaaggctgatgctcaagcatagaagtttgaggctgcagtgagccatgattgtgccactgcactctagcctacgtgacagaacaagaccctgtctcagaaagaaaggaaaataaagaacaatttctttaaaaacaaaaagattttaaaccacaaattttttgccgaattaatgtgttgaaagtagtctctaccattttattgctataaagcttgtttataataaaattatttgttgagagcattaataataagggaaccttttcataagaaggaaaatacaacaaagttttataatctttgaatcaaggtcatgcagtatactagtgaagttcagtataatttacatcctcctttgtgtattcagggacaaatatttatctaatgagaattagtatgtaaagaatgattggaattaatgacatgaatgtgtatatcttagaaaaaatgactattaaaacatctgacaaacataggagatttcttaatctagtaatgtatagtttcaaaagttttcaaagctacattcaataaagcattgcttttaccaccagaaaattgtttacacttacaaggtcgtattatatcagcctttaaagtatatctgtgtgcctttaaattaataagtattcatttatttgtttatattattcagccctgaaaatgtgaacttaattgcttatgatttcagttactttaaaaaatgtagttttacacagattcacatattgagtgcgtgatgccaaatgaattttggtgtttcaagatttaataatatatgaatagaaatttttaataaattagaacaaaatttttaaaatacttggccttaaagactgtttttgtggccctagaggaaaagagaaacacatttaaccggaaaaagaggtaattgaagtaaattcttctcctttgggaagaattttgtatgaatcttaattcacacaaatctgtaatttatccattatgttaaattggaagagatattacaccatgggaatttgttttataccaaatttataaatctgttatttcattttttatttttactcatttatgtactgtaattttcactttttgaattatgaatatatgtgaatatgcatgaccaaatgtaaaattgttgaaataggaagaataatggaaatattaaatacaaaatagagagtaaaagattagctcttggctctaagtagtcaaggtaagggaaggatagccaagaaatggaaatgatcccaaatttaaaaagaatttgtagaagcacattaaaaatatatagattctagttgaagaaatatagttgtcagaaatatatcttcttaattgaatataaaatactacgttgttttctatttgctatacaagagtatcttgaaaatgccatattcttaattttgtgtggttcatggtcattttattctctcttaaatctctaataattgaagaaatgtgaatatttcatgtttttagtaaggtagggttcaggtataattttctagggtaatatatgtatatacatatatatataatgggttatataattaagagtctttatttgagttaactttttaaaaaagaagttcacttactaaatgtaggtcgactcattagaatagttggtgagtattcaaacagaattgagctcatactgttgtgctatgtcatactgctgttaaatacttagtttaacgtataacataaatgttaaatacttcatttaatcatagattgggagcattttatacagttatatcatgctttgatgaggtaagatttagactatacacccctccatcttcaggtctcattcattcatttattccacacttagtatttatttagtatgtgccaaacattgtgctatctcacaataatgacagaagcttatttcttttgtggagtagagactgatagataaatgttaaattataatttatcataataagtgctatcataggggaatgttcagtgtctacactagatcttagccagagggctgagaagcaatgaggtatgttcagtacctagtgggactacatatttactgaccttaaagtaaaaattgcaatgtcaaatcaaaagggaataatcataaaataatgaaggacaaaaggaaatgatctgattccagtacttaattcagcttattaaaagttcaaatctttgatttttgattgaattcgttctttaaaaaattgttttagaagacaccagaagtactgcatgtaaagcagaatgaactaatttatattgtattatactctgaattactctgataatatgcatgctgatgttcttggatcatgtaccagtctttgaataacaagttctagatgtatgccatccagtctagtagccaccaagccacatatggttattgagcacttgaacggcaaagttgaaattgagataaactataatctcaaagacttattgctaaaaaaaaaagatttaatttttatattgatcaaaacttaattttatctgtttctttttacctttttaaatattgctgctagaaaatataaagttatatgtgtggctcactttatatttcccttggacagccatggctcacacaaatgcttctcaaattttaggctgcataaaattatttggaaagattgttaaatcgtaaatacttaggccctatccccagagactctgattcagtagttttggggtggggctcaggaatttgcatttctaataattttctagaggatgccaatatgctaatttatggatggcactttaaaccataaggttttaatgtagacagtatcttttcagtgggttgaaaagaatgctgcctgggatgaatcaaaagcaataccagttttcacacaatttgttatcgggtctaatctgtaaataagatactgtcatactgtctagaggaatataaatgtaagcattttgctaggcctctgaagaaaaaatgtggaattttgtcaaagactcttaagtattttttaaaataagtatgtgtttgttgtttttacttcttgtaaagagaaaagaaaataactctgtaaaatgggaaagtaagacctagtttgtcatttccaagacaacagaatttacttacattctaaacaaaggagggggagaacaccgtaggaaaaatcttacatacctatgaaggtcccatcgtgtgtgacattggagagagatcttttacttaaagtatttgctttttcttattttcttgtcacagatacatatgataagaaatatatatgtatatttatgtgtgtgtgcacatgtatgtgtgtgttttgagacagggttttgctttgtcacccaggctggagtgcagtagtgggatccatgctcacggcagcgttgaacccccgcactcaagcagtcctcccacctcagcttcctgaatagctaggattgcaggcatacttcaccatgtccaactaatttatttttactttttgtatacatggggtctcactatgttgtccaggctggtctcaaacttctggcctcaagcagtccttctgcttcagcctcccaaaccgtagggttagcaggcatgagccactgcagttagcttcatttttatgttcttaaaaacaattaggcaggggacaatgaaattggaatgaggagtaagataaggcagcaagaaatcagagtgacaggaggaagaagatagaggatggtaaataatggaaagcagtgaggagatagatgattttactaaagttggggaacaaggcttatggtttcttctactatgatacttgtagacctgtttagctcactattctcagggccaggggaagcattttaataatagtatcatctaattttgcaattcatgaacaccttagtaacccagtctccagctaataattctgtttcatccttaccaaatagcccttatgaagagggaatctttcatcattctttatgaggggatctgtttcattttttcatagccctaagactggaagacactttttaatgttgatccctaatcatctttctgtcagctgctgctcattggtcctatttctagctcctagataaacatacaatgtgctttctccctaacaaatcctctgtatttggtgataactgtcatattccttatttcctgagctggccctcatatgatgacaaggagacagtagattgtagggcagaggttgatactatttttttctaatatttgtgtggtacgtttgtgttcttacttggaaatctttgttgggagggctaagatgatcctcttttctaggagcagtggtatattagggttcttcagagatatagaaccaatggaatgtgtgtgtgcatgtgtgtatgtgtatgtttgtgtagctatacatagatgtatagatatatatatatagagagagaaataggtatgggcggggggagagagatttatttaagggctggtcacggtggctcacgcctgtaatcccagcactttgggaggctgaggcgggtggatcgcaaggtcaggagatcgagaccatcctggctaacatggggaaaccccgtctctagtaaaagtacaaaaaattagtcgggcgaggtggcaggcgcctgtagtcccagctgctctggagactgaggcaggagaatggcatgaacttgggaggtggaacttgcagtgagccgagatcacaccactgcactccagcctgggtgacagagcaagactctgtctcaaaaaaaaaaaaaaaaaaaaaaaaaaaaagaaattggctcatgcaattatgggggttgcaagtccaaatctgcaatgtgggttgtcaggttggagacctagggaagggctgatgctgcagttcaactctgaagactgtctgttagcagaatttcttcttatttgggtaaggtgtgttgtttattctgttcagttcttcaactgatagggcacaatgtcccacataaagagcaaatctgctttactgaaaacctactgatttaaatgttcatcttatccaaaaacaccttcacagacagagacatccaaaataatgtttggccaaatgcctgggcactgtagcccagctaattgatagaaaattaaccatcagaagtggaatatacatttctaggtatcaagatggattgtattgtacaatagttatatgttgggataactgctagtgaggaataccttagcattagaactttacacacaagaagctacagttgggcctggtgtggtagctcacagctgtaatcccagcactttgggaggctgaggccaggaggatcatttgagcccaggagttcaagatcagcctgggcaacatagtgagacctcatcgccacaaaaaaatttaaaacattggccaggcatggtggcaggtgcctgtggtcccatctacttgggaggccgaggtgagaggatcacttcggcccaggaggtcgagggtgtagtaagccatgatcatgccactgcactccatcctgagcaacagagcaagaccgtgtctcaagaaaaagtaagaatcacgatcatgtcctactttttaatattcattgaaataaacctcacaaggaggctccaaaaggcagagaaattgggtcgttgttttgtttcttaaagagacataaggattcatagtctagattttagcacacaatgttctgtgaggtgagtccattttagatgcttgtaattttcttttccatggttaagtgttatacaccttttcattgtactaaaggagcaagcagaatgtttttatttggctcgtaataacttagttatggattgatcatattttcattctgatgtgtgcatgtgggagggataatataaaggcaaggtaattttctgcagtgatttctgaaagcttaaagaacatttttgcatacatttgcttatgaaaaaactataatccaagacctgattagcttaatgcaaagtgaaaagtttagtctctgcatgagctagtgactggtaattatatgaaaaacttcgttcttaacttcaaaagaaatcaagtttccttggtgagagaatcttatcaagattcttaatgagagaatcttaaaatataagacaatctctttgtaaactcaatcctcttttctcttaggagtaattataactactgcaacatcaatacatgtaacttgcttcatctttagtattcccatagcagtttatacatccctccagttgaacttatgtcagtgtgtattcattgtttgtataagcctctttcatttattctgttataactctgtaagaggagggatgcagttctattcaactagcattaattgtgtaccactatgcattagttggtaatcttgccctggagagtttagtggtctacatagataagtaatatataagttttaatacagtataatatattatataatggagctgattacgaagtgttgtagaaacagagatatggattcaactcacatttttaagtctttcaaagtgtcacagaggggatgacattttatccgggtcctgatgggtaaatagacattttataggtataccgttgttttttccttctatctagcttttcttcaaatcttggataataccagtcatctactttttacagcttctcaatactggtagccttcagctgttggtcagaaaattactcagtggtagagaatgttgcttttagaaatgtagtgtctgtagtttcagctggtagtgcttttacatattccttccttgtagaatgtatttttctttttggcttagaatatgctttattgtccttaataactccactcaaatgttaccttatttgcaaacttcatgatatttatacatctttgattgtttctcattatagcttgtacataacctccatagtggtatcaatcacattgaattgtggtaatttattaacctctctctgtctcttactggacagttagctctctgaggatatgatttgtgtcctctttattttatattcccaagatagtagcgactcagtaaaaatacactttccttggatgatctcatccactccatgtctttgactaccaaatatgctctaacaacttggaaacaattacagtgctgtgtgtgagtattgaagtaggggtaagtttgataagcagaaccaaggaatgctgaattttgaaaacaaaatgtattttaaccagctaaaatgtgggggcctgaggattatgggaagaacatcctaagcaaagggagagtatatacaaagtcatagtggtgagtaaagaatctagtccattaagaaactgaaaagcttggtatggctagcaaaaagggtacatgcaaggaagggtcaagaggtgaaaagtggaaagggcataagggatcatattatcaaaggacttttatatcatgctaaacatgatttttacttgaaaagcaagtaaaaatcagattggtgttttaaaaagatcagtgtggagacagtgtgaaaggaaaaaaatgttggcacacctaattaccaagaaaggtggtgtgttgacagtgctggagaatatggcatatagagagagtaataaatgtttacattataggaatatggcatacatagggaataataaatctttagagttccagggcctaggaaatgtgaaagggaaatgactaagggtgaaaggataactgaacaatgttgaagggtccagttaagattataaattatgaatttgtagtgataccaggtaacatacttaataacataatttactgttttaaaatcagggaacaggcaaagtatatggctagattcatccagtgctaggatttaatagcaaggtgagataaatagatagggtttagggtactgcagtaatactagagttgttgaaatcattggtctttttttcttccagtgtaggtaagcatgacatgaattatggaaagagggctgatagggaaagaaggaggagttgaaagaatagagttttcaatgaggtttaaaaaatgtttaataagtataaaagacatggtagaagagaagactgatcagaaagtgatttccaaatataagctttcaatcatagggtagttctacctatgatgataggccttgggtgtcatattgtggtggattgttaaagagcagtggaaattattaaagtcagggagtgtgaggccaagttattaaccactgtatgtagattcagagttgttcaggatgatggcaggagttgaaggggagaggcaaactgggagtaagctccagtgtactggagggttgttgtggtactaatgatgagaatgggggaaatacaatgttaccagatggcagaggctgaaaagagagaagctgtttttgaatgaaggcagaagacaaaatgtctcagatatttttgagctaagaaaatacaactttagctccaagcctgggtcttggggtagaaaatgaagaaaagagagttgagaagttctgcatgagagtacttcaagggaagtctcctgagaataatctagctaaaagtgaaagataggagctagagttttgtgagtgtctgaatttaagagattcaaagggtacggtaaaaagtgttcaaaactaggtctgagggggaaattccagtgtaaggatgccgctatgggatgggaaagtctttaattggctgtcgtgcagttaatcttttcccagttgctttgctctgtccatatggtttgggagattgtgatccattttgtcattataatcttttcttttcctctctgcttgagagggtgaattctggtttgactaatattatttccctctttgttcccctgaattaggtactgttaaggggcctccatcacacttttttacccttatcatttaaataaggccagcttgtgataccatgcattccctcttatcttagaacatcttgccttggcctttccccatgccagattgtaggatttttataatttcagcatttgtcgtaggtattagggagatctaagcaattactctagtgccatgatatttagtaaatccagaatcaatctgaaaacctttccgcactcatgttaggctgctatgtattactgtatccccacagtctacaaagaacattatatgtttttagaacacaaacatctccaaattcggggctaaggtcatattgccagtctggcttctactgtcatggggtaatcacatgttaaggtgatagggttggaggaggaggaagtatgggaatgtagtgaagcacgagaactaaatgcagtttttgaagacgagactgaactgatagataattgtgaaatattgcatgtgggaagagtttttgacatctgaaagattctgcaagccacactaagtgtctttattccctaagctatcatggaaccttaagtggccacaggagtcgtgccttagtgtggggtatggagagggagatagttttttggtgagcatcctagtggtgttaacagacgcgatgctctatgctgttacctcagccctgatatttgactatatatatatatatttttttttcttttcttctctttttttttttttgagacagaatcttgctctgtcgcccaggccggagtgcagtggtgtgatcttggcttactgcaaccctctgcctcctgggttcaactgattctcgtgcctcagcttcctcagtagctggaattacaagtgcacaccaccacgcccggctaatttttgtatttttagtagagacggggtttcaccatgttggtcaggctgatcttgaactcctgatctcaagtgatttgcccgccttggcctcctaaagtgttgggattacaggcgtgagccaccgcgtccagtgatatctgactatattcttgaacactgaatctagccactctggataaatatcttgcttagtctagcttagtctcttaatacctttcattttaacatgggacctacaaaaggatagagtacagagatcctcaggggatgcgttcctagacccacagtagatgcctgaaactgtgggtggttctgaaccctctgtatacaatgttttttccggtacatacatacttgtgataaagtttaattattaaattaggcacagttaaaagagtaacaacaataactaatgataaaatattattagaacaatatactgtaataaaagttacgtgaatgtgtactcgctctcctccccatctcaaaatactttattgtactgtacttaaccttcttgtgatgtgagatgataaaataccttcttgatgagatgaagtgagatgaataatgtaggcattgtgaggtagcagtaggctgctattgaccttctggggatatgtcaggacaaagatcatttgcttcaggtgatctgagactgttgagccatgatgatgttgatggttggagttcaggagcagataatgttgatgtctgtgtcaacaactaatgggcaggtagcatatacagcgtggataaaggacaaagggatgagtcacattctgaatcagatggaagtgtgagatttcattatgcaactcagaacggcatgcaatttaaaacttacaaattgtttatttccagaactttccatttaatattctcagaccacagttgactgtgaaaatttccaaaaccgtggaaatgaaattatggaaagtaaaactgctgataaggggcaactgctgtagttctctggggggggaaatgaggttctggaaccatggctgatcatcatgaaggttagactgatagaaacctagaatggattaggtgcctctgtacattaagtatgttgtggaatttttgtcaaaatattaaaactgcttctatacatatctgtctcctttactaaactataaactctttcagagcagagtctgtgtcttgttagccatttgcttagcatgttctaggcacttacctaagtatttaatgatgagtcattgcatgaatctagtaactttcttttgagtggctaacctctcaaaattaatagtgtaacttaaatgtatgtgtaatggtgataatatcgtactcccttattagcatatatttctttgaaaaagcaaggaattttctcaagatatatggtataggtttcctcatactttttatgatgtaatatgtattggtttactgatattttttcagtctcatgtgtattttaagagccattatagttgactgttggaaaattgggttttgtggctgggcatggtggctcacacctgtaatcccagcactttgggaggccggggtgagcagatcacttgaggtcaggagttcaagaccagactggccaacgtggtgaaaccctgtctctactaaaagtacaaaaatcagcccaacatggtggtgcacacctataatcccagctactcgggaggttgaggcacaggaatcgcttgaactcggtaggcgaaggtttcagtgagccaaaatcatgccactgccctccagcctgggcaacagagtgagaatgtctcaaaaaaaaaaaaaaaaaaaaagagagaaattggcgtttgaactacacaggtcctcttataagcagattcttttcaataaaagttacaccaagtgtgcctgcctctccttccgtcttctccacctcttccatccctgctacctctgaggcggcaagaccaaaccctcctcttcatcttcctccacagcctactcagtgcaaagaccgtgaggatgaagacttttatgatgatccacttccacttaatgaatagtaaaatattttgtcttctgtatgattttcttaataacatttgtttttctgtagcttactttactgcaagaatatagtatgtaatacatataacatactgaatatgtgttaattgttatgggtaaggcttctggtcagcaataggctattagttaagttttgggggagtcaaaagatatttgcgggttttcgacttactttatttattcttttatcagcaataattaaatccaacacatatacttactcatttttattggttgatttggtggcctaaagtatgtttctctttttagattagtgttgataggttttgtgttttttgtagccagagtatctggagaagagctgtttgaaaatgtccccgttacgtgattctcttttcagaatgattcagtgtaggggggaggagccaagatggccgaataggaacagctccggtctacagctcccagcgtgagcaacgcagaagacgggtgatttctgcatttccatctgagctttgaagagagcagtggttctcccagcacgcagctggagatctgagaacgggcagactgcctcctcaagtgggtccctgacccctgacccccgagcagcctaactgggaggcaccccccagcaggggcacactgacacctcacacggcagggtattccaacagacctgcagctgagggacctgtctgttagaaggaaaactaacaaacagaaaggacatccacaccaaaaacccatctgtacatcaccatcatcaaagaccaaaagtagataaaaccacaaagatggggaaaaaacagaacagaaaaactggaaactctaaaacgcagagcgcctctcctcctccaaaggaacgcagttcctcaccagcaacggaacaaagctggatggagaatgattttgacgagctgagagaagaaggcttcagacgatcaaattactctgagctacgggaggacattcaaaccaaaggcaaagaagttgaaaactttgaaaaaaatttagaagaatatataactagaataaccaatacagagaagtgcttaaaggagctgatggagctgaaaaccaaggctcgagaactacgtgaagaatgcagaagcctcaggagccgatgcgatcaactggaagaaaggatatcagcaatggaagatgaaatgaatgaaatgaagcgagaagggaagtttagagaaaaaagaataaaaagaaatgagcaaagcctccaagaaatatgggactatgtgaaaagaccaaatctacgtctgattggtgtacctgaaagtgaggcggagaatggaaccaagttggaaaacactctgcaggatattatccaggagaacttccccaatctagcaaggcaggccaacgttcagattcaggaaatacagagaacgccacaaagatactcctcgagaagagcaactccaagacacataattgtcagattcaccaaagttgaaatgaaggaaaaaatgttaagggcagccagagagaaaggtcgggttaccctcaaagggaagcccatcagactaacagcggatctctcggcagaaaccctacaagccagaagagtgggggccaatattcaacattcttaaagaaaagaattttcaacccagaatttcatatccagccaaactaagcttcataagtgaaggagaaataaaatactttacagacaagcaaatgctgagagattttgtcaccaccaggcctgccctaaaagagctcctgaaggaagcgctaaacatggaaaggaacaaccggtaccacccgctgcaaaatcatgccaaaatgtaaagaccatcgagactaggaagaaactgcatcaactaacgagcaaaatcaccagctaacatcataatgacaggatcaaattcacacataacaatattaactttaaatgtaaatggactaaattctccaattaaaagacacagactggcaagttggataaagagtcaagacccatcagtgtgctgtattcaggaaacccatctcacgtgcagagacacacataggctcaaaataaaaggatggaggaagatctaccaagcaaatggaaaacaaaaaaaggcagggattgcaatcctagtctctgataaaacagactttaaaccaacaaagatcaaaagagacaaagaaggccattacataatggtaaagggatcaattcaacaagaggagctaactatcctaaatatatatgcacccaatacaggagcacccagattcataaagcaagtcctgagtgacctacaaagagacttagactcccacacattaataatgggagactttaacaccccactgtcaacattagacagatcaccgagacagaaagtcaacaaggatacccaggaattgaactcagctctgcaccaagcagacctaatagacatctacagaactctccaccccaaatcagcagaatatacatttttttcagcaccacaccacacctattccaaaattgaccacatagttggaagtaaagctctcctcagcaaatgtaaaagaacagaaattataacaaactatctctcagaccacagtgcaatcaaactagaactcaggattaagaatctcactcaaagccgctcaactacatggaaactgaacaacctgctcctgaatgactactgggtacataacgaaatgaaggcagaaataaagatgttctttgaaaccaacgagaacaaagacacaacataccagaatctctgggacgcattcaaagcagtgtgtagagggaaatttatagcactaaatgcccacaagagaaaggaggaaagatccaaaattgacaccctaacatcacaattaaaagaactagaaaagcaagagcaaacacattcaaaagctagcagaaggcaagaaataactaaaatcagagcagaactgaagtgaaatagagacacaaaaaacccttcaaaaagtcaatgaatccaggagctggttttttgaaaggatcaacaaaattgatagaccgctagcaagactaataaggaaaaaaagagagaagaatcaagtagacacaataaaaaatgataaaggggatatcaccaccgatcccacagaaatacaaactaccatcagagaatactacaaacacctctatgcaaataaactagaaaatctagaagaaatggatacattccttgacacatacactctcccaagactaaaccaggaagaagttgaatctctgaatagaccaataacaggagctgaaattgtggcaataatcaatagtttaccaaccaaaaagagtccaggaccagatggattcgcagccgaattctaccagaggtacaaggaggaactggtaccattccttctgaaactattccaatcaatagaaaaagagggaatcctccctaactcattttatgaggccagcatcattctgataccaaagccgggcagagacacaaccaaaaaagagaattttagaccaatatccttgatgaacattgatgcaaaaatcctcaataaaatactggcaaaccgaatccagtagcacatcaaaaagcttatccaccatgatcaagtgggcttcatccctgggatgcaaggctggttcaatatacgcaaatcaataaatgtaatccagcatataaacagagccaaagacaaaaaccacatgattatctcaatagatgcagaaaaagcctttgacaaaattcaacaacccttcatgctaaaaactctcaataaattaggtattgatgggaggtattttaaaataataagagctatctatgacaaacccacagccaatatcatactgaatgggcaaaaactggaagcattccctttgaaaactggcacaagacagggatgccctctctcaccactcctattcaacatagtgttggaagttctggccagggcaatcaggcaggagaaggaaataaagggtattcaattaggaaaagaggaagtcaaattgtccctgtttgcagacgacatgattgtttatctagaaaaccccatcgtctcagcccaaaatctccttaagctgataagcaacttcaaagtctcaggatacaaaatcaatgtacaaaaatcacaagcattcttatacaccaacaacagacaaacagagagccaaatcatgagtgaactcccattcacaattgcttcaaagagaataaaatacctaggaatccaacttacaagggatgtgaaggacctcttcaaggagaactacaaaccactgctcaaggaaataaaagaggacacaaacaaatggaagaacattccatgctcatgggtaggaagaatcaatatcgtgaaaatggccgtactacccaaggtaatttacagattcaatggcatccccataaagctaccaatgactttcttcacagaattggaaaaaactactttaaagttcatatggaaccaagaaagagcccgcatcgccaagtcaatcctaagccaaaagaacaaagctggagacatcacactacctgacttcaaactatactacaaggctacagtaaccaaaacagcatggtactggtaccaaaacagagatatagatcaatggaacagaacagagccctcagaaataacgccgcatacctacaactatctgatctttgacaaacctgagaaaaacaagcaatggggaaaggattccctatttaataaatggtgctgggaaaactggctagccatatgtagaaagctgaaactggatcccttccttacaccttatacaaaaatcaattcaagatggattaaagatttaaacgttagacctaaaaccataaaaaccctagaagaaaacctaggcattaccattcagtacataagcgtgggcaaggacttcatgtccaaaacaccaaaagcaatggcaacaaaagccaaaattgacaaatgggatctcataaaactaaagagcttctgcacagcaaaagaaactaccatcagagtgaacaggcaacctacaaaatgggagaaaattttcgcaacctactcatctgacaaagggctaatatccagaatctacaatgaactcaaacaaatttacaagaaaaagacaaacaaccccatcaaaaagtgggcgaaggacatgaacagacacttctcaaaagaagacatttatgcagccaaaaaacacatgaaaaaatgctcaccatcactggccatcagagaaatgcaaatcaaaaccactatgagatatcatctcacaccagttagaatggcaatcattaaaaagtcaggaaacaacaggtgctggagaggatgtggagaaataggaacacttttacactgttggtgggactgtaaactaggtcaaccattgtggaagtcagtgtggcgattcctcagggatctagaactagaaataccatttgacccagccatcccattactgggtatatacccaaatgactataaatcatgctgctataaagacacatgcacatgtatgtttattgtggcattattcacaatagcaaagacttggaaccaacccaaatgtccaacagtgatagactggattaagaaaatgtggcacatatacaccatggaatactatgcagccataaaaaatgatgagttcatgtcctttgtagggacatggatgaaattggaaatcatcattctcagtaaactatcgcaagaacaaaaaaccaaacaccgaatattctcactcataggtgggaattgaacaatgagatcacatggacacaggaaggggaatatcacactctggggactgtggtggggtggggggaggggggagggatagcattgggcgatatacctaatgctagatgacgagttagtgggtgcagcgcaccagcatggcacatgtatacatatgtaactaacgtgcacaatatgcacatgtaccctaaaacttaaagtattaaaaaaaaaaagattcagtgtagttgtagtgctagatatattatatggaattatcagcagtttaccagttggttctttattagtactcctgatgtcttaaacaaaaatgaataattgtttatcttttctcaaagtgtctcatctgttcagtaacaatcacagttttctccgacagtcttgcatattacttttttttaaagtgctttggtttgatatttctttcattcatttctcagaatagaacttaattcttccctcttccaaacatatgctttttaaatattgaatttcctcaaaatatttcatagttaacgcagccaatatcttagccatcttccccaataaatcaaaaacctctaccaaaagttacataaaattattcattgtcatttcagcattaggccatcttttaacctttgggtaattaatatcaaatttctacttggtcagcaatatctcccttttttcttccccattctcaacccctttcttgaacctcattcgataactgctgaatttcttttctttctaggattatacttgaaaggaaattgtgatttattcccattaaactttaaaaacattttggctttatttaagccaacatgattctatttggatttgctttctttttcactacagatcttaatcacttctgtttcttttatgccctgtgtttctacatttatttattttttctttattaatgcttaaattctttccctcctcagctccagcacccatttcccttccttttcttgcttcacaacccttctcctttggggaagttataagattagagtgagatgaccctcagctccactcactaggttacaggattcattattaatcctacagattagttttagtcatgtgagccatggtgattttggtctctttttcttttttggaaggtaggtggaagaaaagacttttgtgttgctctgaattgtgtggtgtgtgcctgtaagagctagaattagtatagtcgtttttctactctgatacaagctagtctgatgacagtgccacacacagacgaggagaaagttgaggagatctcagagaaatgaagcaggagccttgattaacctgtttatgaagctcattctacttccagactttacaatgatgtgatctctgagctgataaattcttctactggagtacagtacagtagtttctattacttccagtatatcctaactgatatatacaaattgtaacatttttttaaaaatctaaagtacagtaagcatattgttggtcagcctaaataacagagagaggctctcttaacagaaatgatatttaggaatagggcattgccatgggaatacatgtgccatgataaactatgcatgtttcagggaagtacaggaaaacaaaggtttttaatagaaaaaaatgagaaggattacataattgttttgagataattatccttggctacaaggatcacactggtctgaggttggacagacagttgctgggcagatgtctttccagaagtattttttgtgtaaggttgtgacagcctttgtgtaaggttgtagtttttgaagaatgttttgtgatagtttttgtcaggcatttattcatgagaaccctattttcatagcctttcctgactctgtttgttaggatttttttgtttttgtttttaacacgagtgactcttgatttcaacagctttaattttctcccttttgatcaagatctttctctgaaggcattgatgatcagtcttcctgtaattaggttttgattgtcccttggtgctgggatggactggtttggtcccacattggagagggtgattggtgaccaggaatcagtgttaaaatttttctagccacatttgagcaacaagggagattgaaggtgagtggttcttggtctaagcctatctggagaccatcattaagtttaattttctctgttttgtaggtgcttgctgtcatctcaaagtgctgagctagtattattttgttaggagttgtacttctgcaaaaatttaacaagtaacagatacaaagtttaagaaaggaaaatacaaagtaaaattcataataatatggcaatcccagtttgcataatggttttgagccatgaaacctagcgtaaagacaactaattaaataattccagtggccatagagaatttggtgagacctattgtaaccatgtggcctgttttcttattttatgtatatggggtctcaactttcccataggaatttatccagttacagcatgtggtattagcaatagcacaggcattttcttatttaaccagttgatacaaaaagatctcttaggtttcattctttcaaactaccagcagaagccactgattgttaaatttcagttatggcattctcctatcaagtgaaaaaaagtagcattgaggtgcgtaagagtcttactattatataaaagtcttgttccaacaccttgggaaaaaccgtctaccatgtaaaaatgtcacctccttgtcttggtttgcagtttgaatgtctctagttagggcatcgggtggtttggtgaactttccgtgtgattcgtacatcaggcccaggacttgttccttcagatccatctagtttcagtttataaagctttaggaaaatttaggattcgttctagtctacaggtagataagaactattttaaaacaatgcacagagctacaatctaataaggatgtgttttatagttttttttaataaacataactttctctgtatagtcatcgtgatttatttatttaattttttgagacagagtctctctctgttgcccaggctggagtgcactggtgcgatctgagctcactgcaacctccacgtcctgggttcaagtgattctccaagtcatcctgatttttatcaaagataatcagagtaagacaaacttgtttgtaaaataagttttatcaataattgcctgtaagaagtgatttgatcacacggtattcccagatttaaaaactcttaaggctgcaaagccaaaccaaggcagattttagattttacctacactcttaaggttcctgagcttgtgggaagtgacactttttactcactcactgtgaggctgggaacccttgaaaccaagcatcgtatgcacattctcaaatatgatatttcagtcaaagccttggtaacacaaccagtgtattttattgtatcttgatagaaaaacaatagatttttattgaacctttcagttaaccatattgccataagaatactcacaaataatttttgaattgggggggcagtcaaataaggagaaaatgcaactatttctacctttgttcataaaagtatactttattaaattgcctaaagagaaagtttccttaaatctggaaaacagaacatttaagtaaataactaatagtgtttcatataaaagtcatggaaacattatctttatcatttatttaatctcatctgttttatttttgcttcatcttaacagtcttttgaacccatcagtttattagtgttctagaaaaaaaagatttagtccattaatcttaaagttattagaaacctgcatttaaaaggacccattagggcaaggtgtggtggctcatgcctgtaatcccaacactttgggaggccaaggcaggcagatcacgaggtcagaagttcgagaccagcctggccaacatagtgaaacctcatctctactaaaaatacaaaaaattagctgggcatggtggcagacacctgtaatcccagctactcgggaggctgaggcaggagaatcacttgaacccaggaggcagaggttgcagtgagccaagatcatgccattgcattccagcccgggtgacagtgtgagactccatctcaaaaaaaaaaaaaaaaaaaaaaagtgcccattagggccttttctgttaatctgattgtaaatacttgttttttattccagtatttattgtgcacaagtgaccagatacatatatatttccttatattctcctcttttttttaaatttttttagtatttattgatcattcttgggtgtttctcggagagggggatttggcagggtcataggacaatagtggagagaaggtcagcagataaacatgtgaacaaaggtctctggttttcctaggcagcacatcctgcactgcccttaatccatttaaccctgagttgacacagcacatgtttcagaaagcacagggttggggataaggttatagattaacagcatcccaaggcagaagaatttttcttagtacagaacaaaatggagtctcctatgtctacttctttctacacagacacagtaacaatctgatctctctttcttttccccacatttcccccttttctattcgacaaaaccggtatcgtcatcatggcccgttctcaatgagctgttgggtacacctcccagacggggtggcggccgggcagaggggctcctcacttctcacacggggcggccgggcagaggcactcctcagttcccagatggggtcgcggccgggcagaggcactcctcacttcccagacggggtggcggctgggcagaggcgctcctcacctcccagacggggtggtggccgggtaaaggcgctcctcacctcccagacggggcggccggacagaggcgctcctcacatcccagacggggcggccgggcagaggcgctccccacatcccagacgatgggcggccgggcagagacgctcctcacttcctagacgggatgacggccgggaagaggcgctcctcacttcccagactgggtggctgggcagaggggctcctcacatcccagacgatgggcggccaggcagagacactcctcacttcctagatggggtggtggctgggaagaagcgctcctcacttcccagactgggtggccgggcagaggggctcctcacatcccagacgatgggcggccaggcagagatgctcctcacttcctagatgggctggcagctgggcagaggctgcaatctcagcactttgggaagccaaggcaggcggctgggaggtggaggttgtagcgagccgagatcacgccactgcactccagcctgggcaacattgagcactgagtgagcgagactccgtctgcaatcccagcacctcgggaggccaaggcgggcagatactcgaggtcaggagctggagaccagccccgccaacagggcaaaaccccgtctccaccaaaaaatacaaaaaccagtcaggcgtggcggcatgtgcctgcaatcccaggcactcggcaggctgaggcaggagaatcaggcagggaggttgcagtgagccgagatcacggcagtacagtccagcctcggcaacagagggagaccatggaaagcgggagacggagacgaaggagagggggagaccgtggaaagcgggagacagagaccacggagagggagagggagagagagagggagagggagagagagagggagagggagaaggtaaatacttttataaaaattcaaaacagtaactgtggatgtcagagacttaagagtggctatggttaaaaatccaatggaagtttattatcaacaattgacaagaaaatttagttatatttgtggcatatgacatattatctagaattctgactgattacattagatttctgcattttatataattttggaacattcattatctgtaacatacacatacatgtaactgaaagatctagtatcacctaccatttgacaatgtttcttattcaatttatccaataaccctaatcacttaatatctctacaagatgagagatacattctttgatgctctctaggagcccagtggggaaatcccaaagttaattctaggtcaaaaaatcttaatttagaattttgagcttgggaaagcctgccaaagatgtcaaaaggttcaaaacacttgaacaaaacagtagcacaggtcactgtgaaatcagtcttttttattattattatttattttaaccagagtaataatcaaaagacttcaaaagcaatacagaaagttacatggattttaaaaatcttaacccttacaaagctcagtttccccaaccaatcaaaaatctaataaagaccacatgaagttatcttgataaaatgcaaagtctttgtttctttggccagttaccaaaaaggtaaagagaatttttctgcagtgtaattgcttcttcttatggtaaacccatttagatagcctggaagttgaacctgatgaaaaaggtacttcaggttaatcagacaaaggagaagtgtgtctaaggttatgactctacaccttattatagaggaatgtaaacaataaaattagtaccttgagcaggggaacacgtggatcttagcagcagcctgagaaatttcctggttacatggaataattgagatacatcaggacaagacaagagtgcagaatcaagttttactaggaaacattgcttttctagtccttcaagacagaacatttcagtttcaggtcacaaaaacagagttagaactggagaaaaaaggaactgatgaaaaagttaaaaagagagagtcccagttattgtcccagctaaacaaaaagatgtatttttcaagaggagaaaggaggagagcagaaggcaatgatgcatgacctgcaaatcatgtgcagtgagacacagcagaatttaaacttctgagctatgaatatgagaagctttaagaggaaaactatacctcaagaaatgaaattaccattctaaatgaaaaagacagcatttccaacttgaaactagggaaattagatggaatctgttagaagatggctaagagattttagaattaaaaatcaaaatctcagtacttccaagaaaaccttgttctaacacaggggaccaaatttttagttttgtatcagtgtatttttagtatcaaagctcaatctttagaaagacttgtaaataattcccttctaattatagccaacttgatcacacacaatttctttcctaaattcatctttctcaaacctttcgtgagctgcatagacctttgacaacatgcttagactttttgttttgtcctatatgtcctctttcttaaataacgcaccatctttaggttgaaaatttaccacaagattctttctcatacaaaattattctctttttctttttaacctttcttaccaaaaatacaatttcatacctgtaatttttttaatatctctctttcctacttattttacttattggttccttttcttatttccttcttaaatcatattttgaaacaacctttaacctctgaattagacaaaatgattatctcaatagcgaatacatttttatgctttcatcgaaaacacatttttgtgtactttgtttacaaaattatatatattagaattttaattcttagtaacaatttttagtgaaaacataggaagcaagaaattttgaactgttcattgtatatcagtacttttatagatgagaatcattttgtaatttcagaaaatgtttccccataatttttatgttaaaaatagacccaaacatatttaggctttttataaaatttaagaagctaagagcaaacttacaattatgttcagcaatttatgttttaatgttttttaagaatcttaattggaaagacccagacatttaatgaatatctattacttaatttaacataacagtgggaatttagattgcctgaaaagttcatgggtaaacatttatcctgcctacatttacctggtttatctttaacaattatacctagattacttatgaaagttgagatactgggtaaaactagtcatcatttcaagttatttttcttttaaccatttatatagactgaatatcaggcattcacctaagtaagaaactaaaatatattggtattttgccaataactcagaacacacagctgtttttattaaactaaacagtgttacattagtcttaccaaagaattataccaacaaagattattctgttttaggttgggtttatagtgttatggccttaaaacatctagcagagacaaatataatcctgtctgaccagtaaacttaggcaaaaatgtatgctgataattttgaatacatttttattaagttttaaaaccagcttatttatcaaagtttttttaagtcacgtgaactaaaagacatttggcttaattactatgtatttcatgtaagcgctcatttatttaagccaatctgaatagaattccttaagggatttctggccaagtacatcagattttactatgtagacataacatacaacataaaatatgtgcatgtgcataaacacacctaagcatatatacatacacacaaaaattttggggtaaaactgtttctatagcagtttaaaaaaacaaaaaaaacctcttttacccttcccccacctttgactcagtttcacatgagtttagggttaaatattcaatgtttacatttttagctaggactggctgaattgtatgagaaaaacaaaatttctaagtggcattgaattttcggtaacaagtctatcttttgtttgccagtctgatttgcttgactagtcagcgtagcagggaaatcgtttagtgtgtttttggttttttgtttttcacccccgcatggcagaaaaaggaatttttatgctagacagagatactttatattgtttctttgagctcaagactttcaagtgtttgatctgagatcctaacttttgtgagcactatatagttctttttcttttagactatgaatccttcagttaactgtttctttaccctaagcaattgttagtcaggcaaacctaaatttacatttccaaaagatacttaagtcgttagttgtcatcgagctgttatactttgtaaagctattaatttgaaagtcctttaatacttttttttttttaatcttggctggaattccataagcagtgagttttatatcaacaccagtaggaaaatcagcagaatcaaagtaagcaaaaaaaaaaaaaaaaagagatggggaaggtagaaggctttacatgtcagcttaatatttgcaggttttttgtttttttaaaaagagagtttgaataatgactgtttgagctctggattttcctcgatatacttggtccatcagttaaaaaatgagaataggccataagatgtagcctgctgaagtcccctagaacctgacatgccttaatgtttgagaattccattccttttcttattaatctctcaaaagtacggaaaatcccataaattctgtcagggtatgtcaggactgttgttttaggtgctggtgactgtcctactggcttttaattaatcattctgtgtccatcaggctacaaggatcaataataagagtgaggccagtctcaggttggtcatgcagttgctgggcagatgtcctcactgaggttgtaagtttgtgatggtctttgtggtttttgcagtcttctgtgatagtttttgttatcagggatttatgcatgagaacactctcttcatgaccttttctggctctattagggttgtttgtttgtttgtttttaaacacaggtgactccattttgatttggacaactttcaaattgtatagaatgtggaaaatatgaaaaagttttttttttattttacaagtttgaattatttcacataaatgtagcttctttttaaaaaaacttatctttgaatgtttatcatattaaatattcttttaaaatgatattattaatgactatataatgttcttttagaatgctagaccgtagtgatagttgtcttttaagatgatactgtgagccacttcactctttcctttggccaagattaatgttgattttaagtgacttcttaccttttttttttttttaacttttctgtgtacctttctgttgttttattttcctgggaaagtggagtaaattttatatcatacttgtataaagtagtatttccttaaatagattccttggattactcattttcttagatgccctattaagaagtgacttacttgataaacagtgtatactcctattggctcacagtaaacattagcaaattgacgacttcaaaaaatcttgcagatgctaaatctctttatctttatttacttcatattttcccccagggtatctgacaatagaatggagatagatcttttgctgaaaatattttttcactatgttttattgtgtcctcattctcttagtctgcagtaagaaatctgtatttcttataggtaaatattcatatcttcagtaattcaacttcttggtgaacaatctagttatatactctgcttataccacagtcattaacacatttcctcatggtgtttacattctcaataaatatatcttattttttaaccatgtaactcttaaattttttagcaactgctttatgacctacttagtggtaattttaaagaaaatagtcaaactagcagatctccctgcttattctagtgatgatttccacacacataacttctcccactcccacatcctacattatccctggaattgaaatgagtacaagactatcaaaatcatttactgtaattttataaaatgagtctcacaacttagttttttagtgagatctgtttctgatggtgaatcacggtataaatgggtttttgttctgctatctttcttttcatgacttcatatatcctttttttaaactcttgcatttcatgttccttttgtttatttaagatcctcaatcagttttcttcactaggggaagaaagtgaaagaattcactttcttgtcgtcagtgaaagaattgccatttttttttattcccatccctgccacctccactgcaaacactttcattttcttttagaaacattaatttctcatttttctggcccttacattaagctacttatattcagcatatttctcttctgtgttttcattctgggttttttttgttttgttttgttttgtttttgttttttcttgaggcagagtctcgctttgttgcccaggctagagtgcagtggcatgatctcagctcactgcaaactctgcctcccaggttcaagcgattcttatgcctcagcctcccgagtagctgggattacaggcatccaccaccatgcccagctaatttttgtatttttagtagagatgaggtttcaccatgttggccaggcttgcctccaactcctggcctcaactgatccgcccaccttggcctcccaaagtgctgagattacaggtgtgagccactgcacccgtccttcagtctgtttcagcctgcttcattctttgtatatgcagttgcttttctctcatttaatcactgcctcagtttagctatcccaaaatactatacatctctttctcactcagttgtcttactttagttcttactcttgtaaaatgtgttaaataacaatatttttcacataatgatttggcaaatcaggtcaaaatatagtcatcaacatataacttctaaatgacagttgtagtaggaagagctttggagaagaaatcacaaaagctggtttcttattccttttccagtgtaatcttattatatggccttatttgtaatatgaagaacatgacctatcatccctatctcagatgactttttaaatgaagagattaatgtgtttgaaagagctttgaaatttttacaaatgctcttaataaaaaattaagacacagtgtttatggaagtcagataacattaaaaagattgaatagctttcagtcaggtaccttttaatgaggacagtgtgagtctaatgagtaggaattagctaaaatggtagggtgaggggggtggcatttcagagagggaacatcatgtgcagaaaggagttatgaaataagatgattagtatggattactataagtaatttagtatggctagagtgtaggatgtccatggaggagtatcaagagataggattaggaaatatggatgtgcttgaatgtttaatgaaaagatgtggaggattgcttaaaaatttaaaggaatgacataaactttgcattttcagaagtttattcttatactattgtagatgaaagatgcggacagggcaggggaggcaaaccggagttagggagacttgaggaggctattgcatttaacaagggtctgaactgagaacttgaagtaatatgaatgtagaaaggaaaaagatagatgcaaaagacaatagtgaaatggaatctatgggacctatgttctgattaaatgtgggggtaggaagctatttactaaaagagaaaattttataattattctagggcttctggcttaaatgggtttcctaccattcactgagttagagaccaaaatgaatttaaaggaaagagggtaaatttgattttgattttgttaaatttgaggtatttagcatatacccaagtgcaaatgctttgttttctgttgcataaaaggagagaggattggggacttgtctctttggtaattgaagccttgggtttagatcagatcacccaaagcagcatagggctaagtctctttgttacaccctatttttaaaatctaccccttgagaaatatacaattccccagaaaccttgatatccatggcccccctttgattcatatttgtggtccttaatcccaagtctgagccttcagtgaaaacctgtcttctcacaatctgccgtaaggatccctaggccactattttaccacttttttattgttctcataactctaagtaaaacttaaaatgttttttattactctaaagctatattaccaatctaatccaaatacacttttaacctaatagagtcttagtaatagcagtcattatttttatttttttaacttggagtttactataaattggtcaattgcttttcattagtttatcctcatgaaacctatatgataatataacatcataaattcagtttattgtagtagcatacctggaaattccctcttggtatttaactgtaaaggcaattattttaatatgtttacttggcagctttgtttggaacttgagcctttctcaagctataaccttaaattatgagttccctcccattctccttactccctcctttgtaatactttgtattgaccttgacgatttgtgtgagttgtgctttaaactctgctcatatgacattataggctggcttcttgatttactcttattccaagtttctctggcctgattgcccaattttccttttctttcctatatctggcagtgtcataactaagctgcctccttgctaccaggaggtcaggtggagtgaggacatagggcttcagggacagaatgagtgctggaagaacttcaggggctattgtgatggatatgactcctgcctcagctcacacagatactattttaaagtagcaattgcccgtcttatatgggtcctcaaaattcaaaaactgccagttgcctataatttgtaggcattctcaaacatttttgtcactgcacctagatgtgaaggaggagaaagatgttgaattgattcctgcaaacattaaaaaggagtgtagttaaaatgtcaatagtagtctggctacagatagtgaagagtctaccttttttttttaaacaagacttctgatcacagtgcatcgtttttgatttttttttttaacaagtagccattcatttggacatggaatcatcaacccctgactactccttagtgccattttaaaattgtttcaagggttttcacagatatctgagaacatcctcagttcacaggtcaatatacattttgagatacagtgtaatgccagtgcaaaaagtatatatgaaatgaagttaaaactttgtagtttatacaagctggaatagctattattaaaaagtcaaaaaataacaggtggtggtgaggttgcagagaaaagggaatgcttatacaatgctggtgggaatgtaaatagttcagccattgtggaaattagcttggccattttacaaagaacttaaaatagaactaccattctacccaacagttgtattattgggcatgtacccaaaggaatagaaatcattctacaagttggaatagctgttattaaaaagtcaaaaaataaaagatggtggtgaggttgcagagaaaagggaatgcttatacactgctggtgggaatgtaaatagttcagccattgtggaaattagcttggccattttacaaagaacttaaaacagaactaccattctacccaacaattgtattattggtcatgtacccaaaggaatagaaatcattctacgataaagacacacacatcgcagcactattcacagtaacaaagacatggaatcaacttaagcccatcgatggtatactggataaagaaaatgtggtatatatacaccatggaatactacatagtcataaaatgagtgagattatgtcctttgcagcaacatggatgaagctgtaggtcattatcctaagcaaactaacacagaaacaaaaatcaaagaccacacattctcacttaagtgggagctgccaggcatggtggctcacacctgtaatcccagcacttggggaagcacttaaggtagatcacttgaggcagatcacttgaggccagtagttcaagaccagcctggccaacatagcaaaaccccatctctactaaaaaatacaaaaattagctaggcattggggtgcacacctgtaatctcagctgcttgggaggctgaggcatgagaatcacttgaacccaagaggcagagtttgcagtgagctgagatcacaccacttcactccagcctagttgaaagagcaagactccgtctcaaaaaagaaaaaatatatattcacatatatgtatatatgtaaatatatatataaaaagtgggagctaaacattgagtacatatggatacaatgaagggaacagcagacactgggacctacttgaggagggagggtgggaggaagatgagtattgaaaaactacctatcgggtactatgcttattacctaagtgactaaataatctttacaccaaacccccatgacatgcaatttacctatataagaaacctacccatgtaccctaaacctaaaataaaagtttaaaaaataaaaaaatacactttgtagttatttattggacagtggtgtttgagtgataaagtacaaatttgttctttacttttttatgtcacagaaaaatggtagttcccagacgtttacattctaaacctatatagaaatctacatgctagcaggtaaaaataattcctgttagatttttctaaatcgtaaatcagatttatgtgaaaaaccaggttatgtttttcccttttatttctttgacaatagcagtgaaaatactattttcaaattctggattcctgtttagtacagctattctcccagttcactggatttaatctgtggaaagtgtcattggagtgcaagagttagcattgttttgttttgttttccccttgcccctgacattccactatgatattaagccactcttttagttacagttaaatgagacatgcatgggtgatttgcagttaactgctcgcctccacacataacaaatgcttcggcttcatatctaatcatgattcatgccttatgccagactcttgctgtcatcccagtaccagcagatggtggggctagacccctggggcagtatgacccagtgttctaaggttatatttcttctggtagcaatggtcagaaaaggaaagattttaacatggcaaattaagtttagttctttatggctttttgcttaaaaaaaaaaaaatcttaggtgtcacattttcacgtggttccttaaaaacttactttttagtccagtaaaataaactggagtgttatcattccttaactccaaatcctggtagtcaaggggtacaaggagcagtggtttttcactttcctcaaacccatgattggaaatacattttacatacagtacatatatacttacaggcacatatgcatatgcatatacataattcaaaccaaaatttcaatcataatgtttgaccttaccatgtgcaatatttttctcttcttttttgttgtagatgttgttaattcttttattttaaccagtttctagtcttcattccccaagtagattttagcgctcataatggattgggacccacagtttgaaaaactgtattaaacaatcagcacttattataaagaaatatgttacgtacttttttgtggactttctcaaattataaaaaatgattttcctcctctttactgatcacatcagctgccatttagttaacaagaaatttttagggttctctattatttgtatgtatatccaagaatctaaaggacatagaggagctacatatagaaacaaatttcaattgaatgttttaatgagccttataacctctagctttaaacacatgccatttctcttcattgttcacaaataataattttatttctttgagcttttctttatttttaacatattttaataggtcattctttcagtaacatacatgaagtagcttgtttttataggcccattatttgtattttaacaaggaaaggaaagaagtgggggcctcttgaatttctgtatcaccaaatagagttcagaatactatgggtttttgcagtgtactatttctcttcttcattaatggtgatgtgaatgagttgcatgaaaaacataggagtcataggaaccatgtaatcccttgactatcacttttcattccgtataaaatgataggaggtgagttttttgcctaattgccattttttaaagttgctatggcattatagggaaccatagagtttatataaagtgatagctcttagaattcagaagagatgtagaaaaaaagcatttatattctgaatagacagggttagaactaacattgagagtaagtttggtatgcaaatgatatattcagaaagaacttctttatagtctgactgtaaataaacaaaatattatattatcaagtgttttgtgccgattaaaactcaaaataaaagcagcttgtggagcagaaggtaattttgtataaagacatatatttgaatgtataccgaaactaatttctattatgggtgggaaaaattcttgaagaatttattgtagataatggttgtcagtgttagcattaaagattttcactgaagctctttgtatgtatctcttttagatacggaaacaagtgaaaaaatccaagcaagtggaatacttcagctgtttgcaagtctgttgactccacagtcttcctgcaaagccaaagtagctaacatcatagcagaagtagccaaaaatggtgaggtttacctcaagaacttttctgctgggaacgtcttcagttttacatcttacttgtcagtatgctttattaatttatgttttaattttgtagattagacattttttatttctatttatcttttgtttgactcttcatgtaattgttttaaatggctatagttacagtcattcatacctgtcccatctgataacccattccttctcagtagaattatgggaaagctctgctgccctcagctatacctgtgttatttattactttgggtataagattcttgaacttgccactgagtcattcatctttattgccataagagataatatatttttaaatatttatgtttgtttgtgttatacccacataaactcactgttcttttttagtttggcctattgttccgacattggcacttcaacagtatagttggaatatacgttctattttctacactcaccatatatttcttaagtttccatgtaagaatactctggaaaaacaataatgacaacaaagtttagattgtgtactatttatacactgagagattctttggatgaattatatcatagcataaatatttgcatgtggttttaattcagtccgtttgagaaaaacactgaattcctaaagcaatgtttaagcatataagaaggccgtactatatataatacctttagtttgcctcagtttgtcagttttacattattttttagccttttattgtagtatgtttcatatattattctttaaagtgaaggaatttgcgtaatcatcatggcaggtggctttgtaaagtaccagtatatgttggtttgggctggtaaaacaatgtatttttagatgtgttgccaaaaagaaaattgtttgaagctgtgtcatttgtgtagaggttctcaaaatgcatttcaagttccagttagattctatattggtatatgattttttggtggttgttagaaaattggccacttatcactcttatatgtcacatctaagaagcagatctagtttgaaaatgaattctttccagacattgcttgttaacctggaccaacccctatctgaattttcttagatacccagcatcttggtttttaagaacaagtcttttatttttaactttgttagagtcatagtatagatttccagaaatcaaggtagagactccacaatttttatcttaaaatcttttttcttaagcattcttatagtataaaatctgaaattttggataacagatttttgtgaaatggattgccattcctatattctcttacttaataatattcctcataatgctctgtcacaatttcatgacaactctgctttgaagagtttcttacagtaatactctagtagatgacagctatgttcgaaagacataatagaatttttaatgtttatacttttaatcagaggctgataaagggcatatcactaacctccactggttaaaataaataggatacattggtatggtgtttattactccatgaccacattacttttttaagtgattggctgagaaagtggaccagagtcttgttgagtgtttttgtttgtttgtttgtttttgagacagggtcttactgtgtcgcccaggctgaagtgtagtggcaggatcacggttcactgcagccttgacctcccagggtcaagcaatcctcctatctcagcctcctgagtagctggaccataggcatgtgccaccatgcctggctaatttttaaattattattattttttgtaaagacaaggtctccctatgttgcccaggcttgtctcgaactcctggattcaagggatcctcccgccttggcctcacaaagggctgggattacaggcatgagccactgattctggcctttgagtgttcttttcaaaagaaatacgtaacttcagaaatgcaacctgacacaacatagtacactgattgggcatatatttctttttagaaattgacgatgaaaaagattgtatgaaccagagaatatgaggttggaagttaatttgttcatctttactctgctgtgcacagaggagaaatattagcatatacttcttccattcaaataaaccccaaataggtttttgtacgcacaaaaagaatctttaaaaattaacacacctttgtgctgacattcaaaatttagaggatttgtaagaagttccgtgggcgagtttaatgtgggagggtagctttgaccataaattatagtaaaagattttttagaccttttaaatgtattattcccttatataatagacttaagactgatatgaggcaaaggacaaataagatatgacatatctgtgaatatttcagaattgggctctcaaagtatttaataataatagtaatacttcttaatgccagctatgattttgtgctaacataatttaagtgttgtgtacattatttcaatcccatatgagatagagttattttatacagataagaaaacatagaggctaaatatcttacctgtcatcacacttaagtgatgatagttggattttatgcactagtttgtttctctcctttcatttcttttcagtaaatgagaatttatgatggcagtggaatgtgtagaggtggtctgagtacagcggtagcagcatgtaacctgaaagattgggctggtaactgatgtgaaaatgtataaaaaccagcaaaagttgaactgctttatgtctgttcctctaaagtagttccctgcctttgacctgtagcagcaacagactcacccgggaacttgttacatgcaaattcttggatccactcacccagacttactgaatcagggactcaagagtgggcccaaccatctgttttaacaagtcctctaggtaatgctgatgagtataaagcttgagaaccacgtttcagtataaagcagtacagaatcagtacttttgattaacattatgctttttttgttcttctgtgtactttatcatattgcaaagtgtttatcaaaacttccgcctgagtgctcttaacaacaaaagagtgaaaatgtacacccaagaggacctggtgagagcattaaccagaaatacagaagtctcctgttctgttttatttattttaattttgccctctattccataacaggtacatgtagtacatgtttattttagtataaaatgcatgtgtgccctagaaaaatcattgaataaagttgagactccagaaaaatgcactatattgtcaggtagcttaaagtatacctcgagacctcagtgttggaagcttaacctccgtcattttgtaagaatgattatttattttttttttttttgagagggagtcgcccaggctggagtgcaatggtgcgatctcagctcactgcaagctccacctcccgggttcaagcaattctcctgcctcagccccctgagtaggtggaattacaggcacgtaccaccacacccggctaattttttgtatctttagtagagacggggtttcaccatgttagccaggctggtctcgaactcctgacctcgtgatctgcccaccttggtctcccaaagtgctgggattacaggcgtgagccactgcgcccggccagtactttctttaaaaacaagggcagtacaaagagtgagtgaaaaatataaatgtcagtttgacaacccacatataaaagtcactcattcttttatattcatgcctcatagttttccttgtttttcaaaagaaaaatataaaaagctaagagttaatacagggaagttattagagaaaattcaaacatgaatatgttatgatttagtctaataaacactgaggtggactctactactcagtgtttttatttggcttgaaaattttggtttaaaagagagttttaataaaatagtttcttcaggtaggtaaaagtggagaaagtagatgttaggttttttaatatttgaggatatgtgagggggatataaatcttggtgtatataaaaagaaaataattttcatcacagcctgtactttatgatgctgctgaaagaatatgtaattcaagtaggtttgagaaagtaaaagaaagaaagtaaagcgttaacactctaaatttacaaaagaataaaaaataatcgacaattatttaatgaatgtattactacagtcaaagggaaaaacattagtcttaggtggaaatcaactttttatttttattgatattgaaatagagcagtacctattccttaaacctctgtattgaatttctacattaacctatacatgttttgcaaagaaaaaaaagtgaattctatgttgtgtaggcaaatacacatatacagaaacacttaatggctcctgctttctacagcataatggcatccactaacgttgatttctattcactgtcattctgcatgtatcttggtttcagcctctttcccttgcagtactgcccctttccccgaaccaaaattttcagttctccgagttcaaattgcctagagagagaatctgattttttgcctgtttctttttaagttcatcgccattgttctttttaggaaatccttcaaagtagaccatcttttaggctattgagtcagaatccagccagctgtgaaagatagcaggtgtgaatgtagaggtataggtagtaggaacccctttgaagaaggacgactgtcagccattctgaagcctctccaacataatatgtataacattttaaacatattcttttttattattattattctttaagttctagggtacatgtgcacaacgtgcaggtttgttacatatgtacacatgtgccatgttggtgtgctgcacccattaactcgtcatttacattaggtatatctcctaatgctatccctcccccgtacccccaccccacaacaggccccggtgtgtgatgttccccttcctatgtcctagtgttctcattattcaattcccacctgtgagtgagaacatgtggtgtttgtttttttgtccctgtgatagtttgctgagaatgatggtttccaccttcatccatgtccctacaaaggacatgaactcattcgttttttatggctgcataatattccatggtgtatatgtgccacattttcttaatccagtctatcattgatgggcatttgggttggttccaagtttttgctattatgaatagtgccacagtaaacatacgtgtgcatgtgtctttatagcagcatgatttataatcctttgggtatatacccagtaatgggattgctgggtcaaatggtatttctagttctagatccttgaggaatcgccacactgtcttccacaatggttgaaccagtttacagtcccaccaacagtgtaaaagtgttcctatttctccacagccaatccagcacctgttgtttcctgactttttaatgatcactgttctaactggtgtgagattgtatctcattgtggttttgatttgcatttatctgatggccagtgatgatgagcattttttcatgtgtctgttggctgcataaatgttttctttggagaagtgtctgttcatatccttcgctcagtttttgatggggttgtttgtttttttcttgtaaatttgtttgagttctttgtggattctggatattagccgtttgtcagatgagtagattgcagaaattttctcccattctgtacgttgcctgttcactctgatggtagtttcttttgcaatgcagaagctctttagtttaattagatcccatttgtcaattttggtttttgttaccattgcttttggtgttttagacatgaagtccttgcccatgcctatgtcctgaatggtattgcctaggttttcttctagggtttttatggttttaggtctaacatttaagtctttaatccatcttgaatgaatttttgtataaggtgtaaggaagggatccagtttcagctttctacatatggctaaccagttttcccagcaccatttgttaaatagggaatcctttcctatttcttgtttttgtcaggtttgtcaaagatcagatggttgtaaatgtgtggtattatttctgaggcctctgttctgttccattggtctagctctctgttttggtaccagtaccatgctgttttggttactgtagccttgtagtatagtttgaagtcaggtagtgtgatgcctccagctttgttcttttggcttaggattgacttggcaatgtgggctcttttttggttccatatgaactttaaggtagttttttccaattctgtgaaggaagtcattggtagcttgatggggatggcattgaatctataaattactttgggcagtatggccattttcacgatactgattcgtcctatccacgagcatagaatgttcttccatttgtttgtgtcctcttttatttcgttgagcagtggtttgtaattctccttgaagaggtcattcacatcccttgtaagttggattcctaggtattttattctctttgaagcaattgtgaatgggagttcactcatgatttggctctctgtttgtctgttattggtgtataagaatgcttatgatttttgcacattttaaacagattcttaaacatccctgtttttttttttaatatatctgcctgaagcatgataactttatgtctttaaaattagctagcgaggactaccactctttgtttaaaaaagtaaattagctgaaaagcaaatgagttttagaagaaattcttttttactttatccagagactgacagtgactgaaagctgaggaatatattagctttgttttatctttatatgtttttgagtaaaaaatggttccaaagagttttgattccacaatttttctgtaattatttaccctctattattccaagaatacttgaagctattgattgtagagtccaaattttgaaagattggtatcatataggcaaaacataaaagaaacacagtaattcttcaatgttgccattgcctgaatagcaataacaaaacaagcaaaataataagataaacaagttttatttatgaatgagtacaaatcagaccgttcctaaatttcttgttttagtagtcaatgaaatcatcttactgttgggaaccaggcatagttcagtgaaaaggataatgaacatctgtgtttaatatgagttagtagcatgttaatttaagatttgaaatctagtccaggcctggtggttctcacctataatcctagcattttgggaggccacaatgggaggatcacttgagcctagaagttcgacaccagccagggcagcatagtgaaactctgtctataaaaaaataaaaaattggccgggcgtggtggctcacggctgtaatctcagcactttgggaggccaaggcaggtggatcacgaggtcaggagttcaagaccagcgtggccaacatagtgaatccccatctctactaaaaatacaaaaattagctggctgtggtggcacttgcctgtagtcccagctactcgggaggctgaggcagaagaatcatttgaacccagggggcagaggttgcagtgagccgagactgtgccattgcactccagcctgggtgacaaagcaaggctccgtctcaaaaataaatacataaataaaattatctaggcctggtggtacacacctgtagctccagctatgcaggaggctgaggtcagggaggatcccttaagctcaggagttcgaggctacagtgagccattatcatgccattacattccagtctgggtgatagggtgacaccttgtctcaagaagaaaaagatttgaaatctatgaagggtctaaagtaaccattaactaaagaggtagataagcagattgatgtgtcatctcctatagatggtcattgaattcatgaacatgtacagcataattcattttcttaacatgagtagtaggatacttagtactactgagtttgataacgtcaatgataagctcaaaggttagttgttgagataggaaataatctgagtcttagaagtttacattacaggggatttttagtggtagagtaataagtaagaaagagatgataggaattaattcatttatttcgggacagaggaatacctctgtgatttacagctatcttaggaggaaaagaagttgtctcagaggtgacagctgacagaataacctatatggtatgctctaagaatttgaaaatgaagggaaagagagggaggattgctcatgagggtacctgtggaacaaaccaaggggtagaccatcttgatagagtgaaaagatagtgatttttttagtaggacaggttatagatggataaattagttctttgttaactaactttattgaccagaacatccttatggtgagttgtgatgtccaaaaaggtaattcagttattggttattggagaaatttcatcagttacatacttccttatgttttgtagtggtccatcatgagacactgaaaaaaaaaaaaagtttatgtccaatcatgactgtggtggtatcatggtgagttaatacataaagaatggcataccataaaaataaggaaaaaatgggtttgaaatttaagaaatcttaagatttgactctttagacctgtaaatgtatgggtatagcagcagatatgagtgagccataaaatggattttaataaaggacaggagtgaagataagaagaggatgattccaccacatcttaccaatcaaaaaggacatattattttttaatggttcactgaaacctttatacatatgtatatacttatatttatatatatatttatatttataggcttttttagaaaacaaagtgaaaaattaggcaatatgatggcttagtttataactgtagtactttaattatcaggcttatagaaatacatcgccattgtttccatcatcacacatattgcttccaaagcatatcgttattacgagaagatagtgataaattagttgtgatgtaagttaattaaaatccctttggtttatggtagagactgtcagcaaacaaaaatatgaccccactcagttttgtgtattttatgaagcttttagtagggctgtaacagggtacttttgtacagaaatgtactcttcaaatattcagccaccttttcaaggtggcttttaaataccacatattaaaagtaggtatttattttattaggggagatgatttatgtaaattgtgaatcgttagatttttaattaaacatgtctcttattttcagagtttatgcgaattccatgtgtggatgctggattgatttcaccactggtgcagctgctaaatagcaaagaccaggaagtgctgcttcaaacgggcagggctctaggaaacatatgttacgatagccgtaagtgttgacatctcaataatacacatacatttttaagaattatgatattcagactaatctgcttttgtgttagcagtgacttttctaggctaaaacactaacatgggccggcatgattcagcactgcttatttagcagaatttatggagattcaggtcgttgtattcttatcaaagaaatcataggaaatgaaatgttttcctctgttatcacaaatgatattttcagaggaaattaagtcagtttctaagaaattggggctgtaagtttagaaaaaatacatatgtgcatcttctcaattaggtttcattgaaatattatctctgaatgggaatgcttatggacacagttttttaaagtttctgcgtctgtccaaatacatttttaattatttgcagttcggtaaaaccaatcataaaaaccattctcttctcaaaagctagattggcccattacatttgcattgactccattcctgtttgtcattatatcattgtcatcctcaccacattctataatatactgttctactaggcaaaaagaaagcaagaactggggtatgggtatattgtaacagcgttaacaatttctacttcccctttctacatataaacaaaatacagaaaagaattttaagtatatttagcttaactaggcttattctgattttccttagagttttatttgctgagccaaaacacgtattttatcattcacctgtaatgcctcctaggaatttagttttatttctataactaggataacttttagtgcttattttccccattgagtgtttaactcggatgagttatattttgttataacacaaaagatatggcccttttataataggcagtccttcaaaaagtgatttatgcatataagccagaaagaaaggacataaatatattcatttatgataaagaagtaggaaaaaagattgaaactatagttataactcatatatagcagtagtcgtaaagctagcctcatttattctccttttcttactttttctgaaataggagctacaatagccataagtattgaaatgtcagtaatgaatctgaggacatagatgtcttaatatgaattttaacttcagttttcagtccccagtatagcctgtaaatctgcttatctgctccttcaatccagttctttttatcatagggtattagctttatttacaaaattctgttgctttatgtttataattttgtgttttcatatttaggatttttattaagcaccatagtttataatatcaactttcaagactgaatcatttattatatatttatatgattaattttagcaacatatattagacctcagctgagtaatagtcaaaagattagtggcatgtacttggagagtactgattattactgtttttattcttacttttctgtgtttgttactggaatttaagggtaccaaaagtattcttttttttttttttttttgagacggagtctcgctctgtcgcccaggccggactgcggactgcagtggcgcaatctcggctcactgcaagctccgcttcccgggttcacgccattctcctgcctcagcctcccgagtagctgggactacaggcgcccgccaccgcgcccggctaattttttgtatttttagtagagacggggtttcaccttgttagccaggatggtctcgatctcctgacctcatgatccacccgcctcggcctcccaaagtgctgggattacaggcgtgagccaccgcgcccagcccaaaagtattctttaaaccttgttcattttagttgttcttgaattatacattgtttgaacatagagaatattacctgttttgagaacttttgtcctggagtttttcctattaataaaatagaaatacacacagtgatattttgtctcatattgccttggtttttatgggcatagagtaattttatttcctgtgtattctaaagaaccttgaagttagggtaataaatgtctagttaacaagattattcttttgatgaaactgaagtccattattatagtatttatcatatctatttatcttatgggatatacaatataaagttctatggatatcctttaagttatgaagttaatttttttcattttattatgaatatttataaccaacttatcctcatttagttcaatggaagtcatagctaaatgattaagcatagtaaatacagcccatatttttatacttttaaactttagttcaggaaaatgaagtttgaagtcttaaaagtgaataaatgtaagaagtgattcattacttaatataaatcatgtgatgaaaatgtatttattgtgccatgctttcatatgcatataatttccatagactgcatgctttcttacccttttattcaaaattaaattctgtcaacttctttgtgatttttctagaatgattgcaggacaattacagtgtttatacttgaattacaagaataatataaaagccttgtaaatgtgatgttgtgtggttgatttgggaatttacttgaaatgcatttctcattttattttctgacaactggaaatttttcctttttaaacaagtttttagtggcttctattttaattcatcaaccttcttcactctcgggaatgtaatgcttcatttttaaaaggagtatagaaaactacatgatagccttgtgatcaatacaaagaatcttcttctttcaaataaagtatgttctaaagagttcatatatttgtgttttatctaacttacctatggggctaatcagttgatttccattttattaatgtactccaaatgaataatttttttaacataggtttattcaggatgatagtaggcttacagtagatagtaaagttgatgtaaatagaaagtagtataaagacttcactattggatcacttctcggcctgttggctaagatcaagtgtagaattcactattggagataaaaatttgagaaattcatacatgttctatagatttttactttgacacatgaaaagtaaagcatttgctagcatatttcagttagcatagtgtatttgaaaggaggtgagctccaactgtagaaagaattaccataaaatccgtggaaatctttggagaaaaactaggtcagatttcagttttaccagccttgacagtgcccattttaggaacttttcctaatggaagaaaacggccttatataatcctgacatgaggtaacagactggcataccgctaaatgggacggagtaaagctttgttgctgatgaactttttgaatcccagtctccttcttgcatatagagatgaaagaatcactcactggctgggaacgtttttcatttaaaatgcttggtctcttttcttccagagagctgcaaggcacttcatttatgtatttctctttcgaagtatccgaacagacttctgatataagcaatattttaaaatgcttctgccctttaactttgccaaaataactctttttatgagaaatttgacatctttcagatcagagaagaaaggaaagttgtatttcaatttggaaagaaataatcaaaatatgtgcgattgatgggatacaccagggaatgtggttttaaagcgcagtagtattatatttcagaaatgcatgcctttggcctatttacacttccttttcaaaggttttataaaaaagaggattatgttcttatatagctgtctttgtggcattcctcattttattgatttgtttatataactgtacacattttaaattgctgatatacttaaatggccttatagttttaaaaagctttatgttaaattcccatcctgtatttataattcctggggataaattggtgatttgagactagtgttctgttttgtggatattactgcctgaggtcagaaaataattgttacttgatctactggttaaaagatattagtagaggctagaagaaaatgattacgtgaaattaaatatttgtgcctttttatacaccgaggaagaataatgtacaaatcaaataaaaatgttttaaaattaaacaaatatacctctttatagaaataaaatgtatgcttattatataactggtactattattggaaagatatgtacacttaagcttatatgatatgctatcatacataagataaaaagttgtattcttccttgctgatgagtaaatattaaaatgaggtagtaatcagtcttgccaaagccagtgtttatgaagtgaaatattgtttattcattgacatcaagtataaatgggaaggatgctgaaacatatgcatgtatccgtttgtatattggcgattcttgtgctacactattttaatataaagtctttatttttatgtaaaaattctttatataaaaatagtgtagaaggaattatagttcttactgcaaatactgaaaaatagttaccaataattgtacaatattttatcatgtaagttggtcagaaaagtatatattaatatgatacagacatactttgaaattgccaaagtaatcaaaatatatttgcaacagttatattcaaaagggaactatttatatccagcatttaaaataaatgtttatttcagtgataccaattaggttatttgatgagttatattaggtatgttattaaagtctcatgcaagtctttgtatttaccctattttctgtgttattcagttttagaataaaatagaattatcagtcagtaagtagcgtaaaaataagattcttcagttttcatcaatctgttgtattttatgagtttattattaaagtacatcatgtgtataagaataaacaacaatatgttactgctacttttagagatagtagttatgactattatcacatgaaagcattccactataaagacattctaaatatagattgaagtagatgttgttttgtaacactatcataagctctaaacacaagcatatgccattaaagagctttttaaatggtagagaaaataaaatgaacaaaggaacacaacctgaggacaattacagagcacacactaaatatgtttttttatcagaatgaaaattaataagaatattaactgtagctgttttttaagaaattaaccaaatagtgcattgcttagaaaagaatttgtttacaaattaatataattataaatgtataaaattttaatataacccctagaaagttggtattgcaaatgaatgtgatttccagctccaccattcactaagttgtcatttaatttttctgattttaatttcctccttggtaaagtaagcttgtgtggattaagtatgtttatataaaaagtgtgtgtgactcagtgtaatacatacaataacatacaaaaggtatttccataaagatataaaagccagaagccatataaagagaggcaaagataaatctggtgggaagcagggataatgtgcttaactgtgtataagcactgatttcacttgagcttcttggcagcctatgtgaaaaaacaacttgatatgccttgtaatttttattttatgataaaaaggaatattttagttctttaatcaaacaacttttgagacaaaatagtaggagggacttatcaggatgtcattaattccctagatgattctgtgcacatacctagttacaatatgtaaggatatttactggcattatagtgtacctagtgacggttctacaaaagttgcccagatgttttccatgtgattgtttcttgtactaatcttcaacagaatctgggaaataatactgaggactttacagaaggtagttttatttgggtagtatatcccgagtgtgttgttttttggtggttaaacttgcttaaaggattcagtttaaaaatttgaaaaagttttgacttgaatatatttcctagtttagtttaaaaccagaatacaattctggtttccattcattgtactttatccttttctctgtgttgtgtgatatatccaagttctatttcttgagaccaaaaaccatgtttatctctgatttttgagcccattatcagtttgatggaaacctgactagcatgaaagtgagtattttaaaataccactttagttgtggtacacaaatctgtacatatgttagaattgcttagaaccatacatgcccatacacatacactaatgcatgtaaaaactgatgaaatatgaataaggtctgacattgtaccaatgtcagtgtcctggttatgctattgtgtagtagagttatgcaatgttaccattggaggaggctggataaagggtacatgagacctttctgtgctttttttttttaaataacttcttgtgagcctctaattacttctaaataaaaagttttaaaacctcacctatccagaaagcatatatattctcttccctatgggaaatgaccttgttgtttcagcagtacctgaggtgggaggtgggggcagcaggcatacacataaaattttacagcatagctcacagcagtaattttaatgagtttgtgcaattaatgtgaaagacaaaaatgcctgtaattttttctccctccaaattggacttttatggaaaaaaatcaacaaaaacctaacagccctaaaataagatttacggagtgggaattcgtatttgttgggttaggacctagggacaaaagcagagtaaatttcctagaaagggaataactgatagggaaatattatagaccaaaaaaagtgaaattatgaactcaagtaaacaggttgatattaaaatgagaaaggacatttctgccatagagaataaaagacagaagataaatgaaagtataaaaaaacctttaagtagtaaagagggcactcaaaagtgtatttctgggtatagttctgtcttcccagtaaggtagatgtcaggctcatctgttaataaaagtcaacaccaaaatgatggtaggaagtttgtggttttgggggaaagttcaaaattggggctgtaggacatgtaaatcatgaagatacgattttttaaaatagccaaatagtaatataggtatgctatggtagagatcttgattgtgcatccattaatgtatagtgtgcttaaaatgtctataggctaaggaattattttgactttgatatgtggacaggaaggagcctctgaaagtaacttgaagaaattgatattttcagttttgtagcatcatatagtctaattggaatggacagagatgtgaggcagagatatcaggaagccattacaggaggccgggtgtggtgtggtaaatagtgactgcggcagagagaacgaaattatattgtaaagtgagagacagtactcagatagtttattatcagtttggctggtttttgcgtagcactgcaccaggtttatttaagcaatgtaaagtactctatctcttcagatagtttacactttgagaaactatgatctttccatttttgtacttggtattaaatttaaatccctcttttattaaatggtgtttggaaatccaagattctataaagtttaccttaaaattgtaggacaaagaacacatattactgcttttttccccatgcttgattactttccaaatactatgttataaaaagctaatgtcttagggaagacatgaaatagtaatttcgagtaattgttcttaattttatagatacgaaagtagaggcaacctgtgagagagtattgcacgtggcaaaaatattagatgatttttcttgggttcaataagaagtcatatatggttgccttcccccccaaccccacccccattctctgagtcagaagtctgaatggctttagaactttcctttcctcattaagaggacttaggtagggtgggaaaagtctaattatagaggcctacttgggggtttaaaaacattttttgtctaaatctgttttttccccttacctttaccactctcatttcacctgttaaagtcaaagtttagatatgtgaaacataagatttccagtctgcttattgaaaccctgtcaacacatattatcctctgctctttttaatagggttttgtttacatttttaaaattttcttatttgtaaccaagttgaagtactgagaactttctcaacttttaatcagccttttccttgctacaagtagggtgcattttccttggcggtgaggaaatatgaaaaataaatgctacgtaaaagtgaataattcagggccaggcatagtggctcacgcttgtaatcccatcattttgggagggcgaggcaggtggatcacttgaggtcaggagttcaagagcagtctggtcaacatggtgaaaccccatctctactttttaaaaagaaaacaaaacaaaacaaaactagccaggcatggtggcatatacctgtaattccagctttgggaggctggggcatgagaattgcttgaacccaggaggcagtgatttaagatcacagcactgtactccagcctaggtgacggagtgagactctgtctcaaaaaaaaaaaaaaaaagagtgaataatttacatttttcctgctgagtaaaatgtttttacccgttgagaaactatgctgtcatcagttcagattaaattctaaataactatatatgcatttgctctcacacacacacatatatatatacatatatatatagtctagcataatttaagtatgaaatagtttggtacaaaaacaccttttatatttaaaatatttataaaacgttttgatcttgaacaattggagtaataaattggaacaataaattacatacattattatctaaatgctatgtaaaagtaacttttatggaaataattgagttaaatgactttataatttgtgtataaagatattcagtcttttgctaataaaatgatacagaaatataaaaatatagggagtaaagaaagctttagtaatttctttaggaaatgtattgccatttatggagcctttattagataaagggtttttgaaaaagtagaattattgaacaattttaactaatgtgagaaatctgttggacaacagaaattaatactagtatcagcaggcacaccaaaaactgtgtccatcaaatgctgggccataacctcattttatgctgtgcccttggtactagtgctttgggaaatgaaagatttaattcatttacttttcctgatctggcattacaagtgtaaatgtatatacaccttgaaattttcccacctaaatgcagatttttaaacctgaatataatgtcacaaaattgcaaattgcatgcttctcttttgatatgtgtgcacttaacagtcatggtggctttttcttcatgactcatttttgtgattttacttatgtaatatgttatagcttttgcttttatatctagtctttcagggattttgcctgaatctggaaggtgaataaattgcgttttgagttttagaaacgatattcatgagcttttttatttgaatgctgaaaacattcgattatgtctaaggtacataatagaaattcactgttggcaaaattatagggggaaatgtaagcattagaatttaattttctttcctagtagacttcataaatacattttaactttatcttgaaaaacaatgtagggtctgcatgtggtggctcacagctgtgatcctaacattttcagaggctaaggtgagaggatcacttgagcccaggagtgcaagattagcctgggcgtcatagcaagatcgcatctctacaaaaaataaatttagctgtgcatgatggagcacttctgtagtcctgctactcaggaggctgaggtaggatgacacgagcctgggagttcaaggctgcagggagacatgattgtgctaccacactccagcctgggtgacagagcaagaccttgtctgaaaacagacaacaactaacacaatgtaggtatgtctattaccatttccctgctccaggaaattaaaatagaacttggcaaaattaaaagcagtatatttaataggaatgggaaaaaaaaagccttcataatcatgcagatcagaatggccagtatttcagacttagaaaaatacgttgctgctcatgatttacatccctgacttctaatctctttgagtgtgaaaacttcctttttaacaccacaaattattgttctctccctttgaggatataggtcacatatttttatagtaatgattgtacttacaaaatgtatgtactgagaagatatgaaataatgagtaaatgccaggaaattctcactctatgtctttgtattctttggtgtatacatactacaattaaatccacacatattgattgaaccaactatgtttaggggacactgcctgtgatggggattataggggaaagaatgagcaagaagtctctatccttgtgaggctttcacaggaggaggtagataataaacaagtaaatactacagaaaagatatttatagattgtgatgactgacatcaagggaataaagaaggtgatgtataataatggagtgtatttgagggtgaagaaagttctctctgtggatgttatttaagctgaggtctggaaaatgagaatgagccagctaagagaagaggaagaatattccttatagaagtagagtaattgagctaagtgtggtggctcacatctgtaatcccagaattttgggatggcaaggctcaagggctgcttgaggccaggagtttgagaccagcctgggcaacacagcaagactctgtctctacaaaataaaaaatgagccattatggtggcacgtgtctgtaatcccagctactctggaggctgaggtgggaggatcacttgagcccaggagttctaggctgcagtgagccatcacaccacagcactccagcctaaataacagtgagaccctgtctcaaaaaaaaaaaaaaaaaaaaaaaaaaagtgtagtaattgtaaagccctgagagggcaagggatttggtagaaattcagaaaggaaaccaggttatgcaagatactgtgaacagggagtattgtgtgataaagttcaagaaacaaacaaaagtgttgatgatagaaagcctcatgaatcatcttgaagtagtgagaagttgttgaaggcaagaagtgacatgatctgatttggattctaaaaacatcactcttggagctgcatggaaaaggagttgagaagcatggaaattaagagttaagaagggaagcattgagactaattgaaagacttttgtgattgtccagtcacaacataatggtaacttggattaagttatggtagtgtggaaggaggaggaacttagaaagtatttggagtgatggattggattgggaaagtgcgaaagggagaaatcaagagtgatttctaggacttgagtacctggacagaagatggggcaatttgccgatgtaggaaagaacagaggttgttttttgtttctgggtttttccgtcattgctgcttgtttttattttgttttgctgcaggcattattaagtctgagattcttcatagagacacaagaagaaatggcacataggcgatttctatatctttatattcttttacctttggggaataaatattcaaaaagttaaaataatctcctgcatttagcaaaatgttgttaactgtttcttagatggaatatgtagattcagggaaccaagagaaattagaaagcttaagtgaataaaactaccttgaaatcatagttttttacgtaggagggaatttaaaagtcatctcagccacccctgccaaattttacagataaaaaaactgagacctgaaaattcaagtgacttatcagaatcaacagctaaattggtgatagtgttgatctgaaaaccagatctcaggttcattgtttccgtaaatatatctgaggaagttatcactgtcaaatacataaatgcactgtcattaaatacatttatgcttcagtgtgaataattctgagcacgcaggttttggaatatgttttaaggattttactaaaagctgttcttaagccaacattttgtttaatttgtttaaagaacacaaaaataaaatttacctaattgaaagaacatagagtagaaccaagtgatggaggaaaaactttttacatttttccaagtataaaagctttatttaaaaaaaaaaaagtatgatgtgagggctgggtgcagtggctcacacctgtaatcccagcattttggggaggctaaggctggaggatcactggagtccaggagttcaagacccaccagagcaacatagggagatcccatctctacaaaaaagtaaaagaattagcctggcgtggtggcacacacctgtaatcccagctactccagaggctgagacttgagcccagaaagtcaaggctgcagtgaactctgatcaggccactgcattccagcctgggtgacagagcaagaagaccctgtctcaaaaaaagaaaaaaaaagtatgtatgtgaataaacattctttattatatttgatttattcttgacattttctctgtagagaagtgtgtgaaatactgacttcccttttaaactcattgggaataaaggatgttcagatttgattggattcttagtaatacctaaggaaacccaattaaaaatttgagagtttgactcttcccagtaaaccagctagacaaatacaggtatgttcttcaagtttgcagacaagtatctattgctttgtattgttttctttacacacaaggtgtataaagaaaaattaaaattgagccaggcatcatggctcacacctgtaatcccagcactttgggaggctgaggtgagcagatcctttgagctcaggagtttgaaaccagcctgggcaacatggcggaaccccctatcccctctctacaaaaaagtgcaataattggcctgttgtggtggcatgcacctatagaccctgctacttgggaggctgatgtgggaggatcgcttgagcctgggagatcgaggctgcagtgagtggagattgtgccactgcattccagcctgggcaacagagcaagaccctgtctcaaaaaaataaaataatactgtccttctaattgttctgaataaattcactttttcctgcaataatgatataaggaatttatacacatctaactttttttaaatgttactttttatcacttttgttcgatttttactgattgttaatatacccttttaaatatctctattggcacagcaaagtaagcttttcagtttagtagctctctaacaaaatattttctaattctgtgctttaagtgaaataaaacggggatgaaagtggcaaaaccatattatcatgtccatgagcagccaaaaagaagtctttagtgaccagagaaaccttaacgtaaacagtaagaagcaagtaataggacagaaacaaacagattctttactcagaatgtttgtcatttgaagtaaatacaagtggtggttctctttctctcactctcttttcaacataatatgggtgagttaataagtatttaatatatatgtgatatggtttggctacatcctcacccaaatctcatcttgaattcccatgtattgtgggagggacccagtgggaggtaattgaatcatgggggcaggtctttcccatgctattttcgtgatagtaagtctcatgagatctgatggttattataagggggagttttcgtgcacaagctctctttgcctgctgccatccattgaagacatgacttgcttctccttgcctttgaagccatgattgtgaggctttcccaaccacgtggaactgtaagtccaattacacctctttcttttgtaaattgctcagtcttgggtatgtctttatcagcagcatgaaaacaaactaatacagtaaattggtaccaggagtggggcactgctgaaaagatacccgaaaatgtggaagcgactttggaactgggtagtaggaagagattggagcagtttagagggctcagaagaagacaggaaaatgtaggcaagtttagacccctacaggcttgaatggctttgcccaaaatgctgatagtgatatggacaataaagtgcaggctgaggtggtctcagatagaaatgaaaaacttgttggaaactggagcaaaggtgattcttgttatgttttagcaaagagactggcagcattttgcccctgccctagagatttgtggaactttggacttgagagagatgatttaaggtatctggcagaagaaatttctaagcagcaaagcattcaagaggtgacttgggtgctgttaaaagcattcagttttaaaaggaaaacagagcataaaagtttggaaatatgcagcctgactatgtgacagaaaagaaaattctatttttctgaggagaatttcaagccatctgcagaaatctgcgtaaggaggaaccgaatgttaatccccaagacagtggggaaaacgtctccagagcatgtcagaggtcttcacagcagcccctcccatcacaggcctggaggcctaggaagaaaagatggttttgtgggccgggcctagggcctgcctactctgtgcagcctaggaacttagtactctgccttccagccactccagctatggtgagcaggggccaaggtacagctcaggctgtggcttcagagggtggaagccccaagccttggcagcttctatgtggtgttgatcctgcgagtgcacagaagtcaagaattgagtttgggaacctccacctacattgcaggaaatgtatggaaacacctggttggccaggcagaagtttgcttcaggggtgggaccctcatggagaacctctgctaaggcagtgcagaagggaaatgtggggttggacccccgcacagagtccctactggggcatcacataatggagctgtgagaagagggccaccatcctccagaccccaggacggtagatccatcaacagcttgcaccaggcacctggaaaagctgcagacactcaacaccagcccatgaaagtaaccaggatgggggctataccctgcaaacaagagggcagagctgcccaagaccatgggaacctacctcttgcatcagcgtgacttggatgtgagacatggagtcaaaagagatcattttgaagctttaagatttgactgccctgctggatttcagacttgcatgcagcctgtagctcctttgttttggccagtgcctcccatttggaatggttgtgtttatccaatgcctatagccccattgtatctaggaagtaactaacttgcttttgattttacaggttcataggcagaagggatttgctttgtctcacatgagactttggactgtggacttttgagttaatgctgaaataagaatttgggggaatgttgggaaggcatgattggttttgaaatgtgaggacatgagatttgggaggggccgggggtggaatgatatgatttggctgtgtccccacccaaatctcatttttaattcccatgtattgtgggagggacccagtgggagataattgaatcatgggggcagatctttcctgtgctgttctcatgatagtaagtctcatgagatctgatagttactgtaagggggagttttcctgcacaagctctgtttgcctgctgccatccatgtaagatgtgacttgctcctccttgccttctgccatgattgtgaggcttcccctgccatgcggaactataagaccaattaaacctcttccttttgtaaattgcctagtcttgtgtatgtctttatcagcagcgtgaaaacaaactaatactgtatgtattacctcatcttggttaactgagatccatattatgcactgctttttaataaaaagagaaaggaatggagatatgccagattatttgttttgagttggtatatatttcaggaagtcataaataaatgagaatgatgagcagttttcttaaaggtgactttatgttaaaattgattgactaacaaccaagcctccaggtaaaatatttaattttttatgagtgagatcaattgcattatttttacatgaagatctatatttaacaatccttatttcctttagccttgaacttttttcatcattttatgatttgtatgattatgttattattaaattaattagaaaagttatacatttaaaatttgtttcatagaatagggcttattcttttctgtagctctgttgattttggagaaggagaagccctatatttacctatataaatcagctaaagttccacttcagtttgatatgcatgtactgaagtcctcttattcactcaggaatacattcattcttttaagaatttttcatttttacagtttattagtctgtttcacatgctagtcaagacatacccaagtctgggtaatttataaagaaaaagaagtttaatggactcacagtttcacatgactgggaaggtctcacaatcatggtgaaaggtgaaggaggagtaaaggcttacatggtggcaggcaagagagcttgtgcaggggaactgccctttataaaaccatctgatctcatgagactcattcactgtcacaagaacagcataggaaaaacaatccgccatgattcagttacctccaactgagtccctcccatgacacgtggggattgtgggagctataattcaagatgagatttgggtggggacacagccagaccatatcatacagtatatgaaaacttcttaaatataatgtttcagtggctcatcattcttttaatgcttaataaccatatactcacaaatacacacctatgatatgatctagctgttttattcctagatacttgcccaaagacttatgcgtgaatgttcaatgcagcattattcacagtagcctaaaactagaaacaacccaatgtcaatcagtatatttgagtggataaaagatatagcggtatatccaaacaatggaatactatttagcaatgaaaaaatacttctatacatgatgacatggatgaatctcaaaatcattagagtgaaaatagacacataaaagaatacttactgcatgaagccatttctataaaatgcaaagtaatctatactgacagaaaacagtggttacctgggaccagaggtggagggaaagatggcttacgaaaggacttgaggattcttttggttgtgatgaaaatgctcagtatgttgattgtggtgatggttgctaaggtatgtagagctgtcagcactcatcagttaaacacactttaaatctgtgtagtttattttacctacatttttccttaatagagctaataaggaagggaatccaattagaatctaaacaaaaaggtacacaatttttgtttctttttatatacatgttaaattgcagtaagggcttgaaagacgttctggaaaacatggctatgaatctctttctgactcctccaggtaaaagtaatttccttatttgtgcttccattttactctgaacacttaattttgtttgctgcttaaattatatgttttccctcacacttccctctttttcccctcacccaagtaaaactgtgaattatctgtctttgtattctcaggacctagttcaatgtatgaaacatagtgagcattcagaaaagtgataaaggagggagagaatgctaatttagttgcagattttgagatatattgatgaaactgactgtgtaatacatttcattaatcagtatttaaaataaggaaattttactcctattaagtaggatttaacttaggttataagtgaactagagaaaacatgttaatgttaccatgtaaatctacctattgtggattcattatttatagatattaggtgaatgtattcatgtttattatgaacattttattcctttttattcctgtgcagttttatataaacctcctttctccttttttctccagtcattcctccaaaagaggtatattctcttctctatgcttctgtaacacaccataaaaaaattgcattaaagctttttttttttttttaacagagtctcgctctgtcaccctggctggagtgcagtggcgcgatctctgctcccagctcattgcaacttccacctcctgggttcaagcgattctcctgcctcagcctcccgagtagctgggactacaggcgcgtgccaacacacctggctaatttttgtatttttagtagagatggggttttgccatgttggccaggctggtctcgaactcctgacctcaggtaatccacctgccccagcctcccaaagtgctgggattacaggtgtgagccatcgcgcccagctgtattgaggcttttattctgtttactactctgtcttcctcattggaatagaaactctttgaaagcaaagtcttgtgttgctgtttgtgtctactgtacctgacacaaagcctaagttaaaacttaataagcatctgttctgtgattgtgaatgtgtggatttatccctagttttatcagtttttgttttatatattctgaagctctgtttgtaggcatttatacatcatttaggattgttatatctttttttttttttttttgagacgaagtctctctgtcacacaggctggagtgcaggagcaggatctcggcttactgcaggcttcatctcccgggttcaagtgattctcctgcctcagcctcctgagtagctaggattacaggcgtgtaccaccatccccagctaatttttttttgtatttttagtagaggcaggatttcaccttgtcgggccaggctggtcttgaactcctgacttcaaatgatccacctcagcctccccaaatcctgggattccaggtgtaggattgttgtatcttcttgttgaattaacccttttgttgttatgtaatgtccccctttatccctgataatactgcttattttttatgttttatttttttagatggagtcttgctctgttgcccaggctggagtgcagtggtgcgatcttggctcactgcaacctctacctcccaggtttaagtgattttcatgcctcagcctcccgagtagctgggattatagacacacgccaccatgcctggctagtttttgtatttttagtagagatgagatttcactgtgttggccaggctggtctcaaactcccgccttggcttcccaaagtgctgggattacaggtacgagcctccgcccctggccaataccgctttttctgatgtctactatgtctgacaatgtagacacaccagttttcctttgatcagtgtttgcatggtatatcttttaccaaccttttaatattatttaatattcttaaagtgggttaattatagacagcatggttgggtcttgcttttttacccaatctgaccatctctcccttttaagtgacatttagattatatgtatttaatatgatctttctgtggttggcttcaaatctaccatcttcctagttgtttctttttttctcccacaaaggcgggtttatttccgaacctagttgttttctgattgtctgaactgttctttgttcctctttccctctttgtccgcctttttttggattcttcacatttagctccattactggcttcttgtgtttttttattgtttgtttttgaggtggagtcttgctctgccacccaggttagcgtgctgtggcgcgatctcggctcactgcaacctccgcctcctaggttcaagcaattcttctgcctcagcatcatgaatagctgggactataggtgcacgccaccatgcccagctaatttttgtatgttttttaaatagagatggggtttcaccatgttggccaggctgacctcgaactcctgacctgaagtgatctgcctgccttggcctgccaaagtgctgagattacagacatgagccctcgtgcccagcccattactggcttctgatgccactttgtaagtttttagtggttgccctgtggcttgcaatatttattcttagcttatcacagtttatcttcaaatattatgtcacattaatttaatcaatcaccttactgtacagttccacttcctcccttaaatcttttatgcttctgttttctatttcatttttacatatgttagaaatcccaaatatattgatgttatttttacttaaaaatttgagacacggtcttgctgtgttgcccaggctggtgtgtagtagtgcaatcatggctcactgtaaccttgaactcctaggctcaggtgattctcttaccgcagcctcctgagtagctaggactacaagtgcatgccacaatgcctggctaatttctttttttccttttgagtagagacaggttctcactgtgttgcccaggctgatctcaacctcctggccacaagagaccttcctgccttggcctcccaaagtgctgagattataggcgtgagccactgtacctggcctgtttttactttagacagtcaattatcttttaaaaataggagaaaaactgtcttaacatacttttatcattttcagtgcactacattctttgggtagatccaaatttttgtctagtatacctctaactgaaaaacttttactaacattttttgcataacaggtttattgcaatgaattatctcttttatttgcttgaaacaattttacttaaccttacttactggaagatattttcactgggtgtagaattctaggttggactttaaagatgttacttcattgtcttctagcttgcatagtttttgatgagaagtctgctttatttcttattttttctgtttttttcccccttccggctgcctttaagagattctctctctttccctctctctccctccctccctctccctctctctccctccctccctcttgtttgtttttcaacagcttgggtatgataggtctaggtatgtttaattgttttcctttgcttggggttctctaagctttaatagatttgtagcatgatggctttcatttttggaaaatttttcagtcattaactcttaaaatatttttctaccctgttctctagcacttcattctctgagattccaggtacagtagtgcccccttatccacaagggatacattctgagaccctcagtggacacttgaaaccaaaggtagtaccaaacctgtatatatcatgtctttttaaatatattttcacacctgtaataaagttaaaccatgaattaggcatggtaagagattaatacaataactaatagaacagttatagccatatgtcagcatcactgctcttacactttgaggccattaagtaaaataagcattacttgaacacaagcactgcgataccgtgacagctgatctgacagttacttaagtgactaatgggcaggtagtgtatctagcatgaatacaccgggcaaagagggagttcatgatttgaatgggatggtgtaaaattttatgttactcagaacagcgtgcaatttaaaactttattttttttatttctggaattttttttattattttcatgctaccattgaccatgggtaacaaactgcagaaagtaaaaccatggatgaagggggactactgactactgtacacttaggttagaccatttgctattttctttccttcagctcttgggtgctctgggttatcccactcccacttgtttagtttgttcatgttttagtttgtgtaatttctattgatctatgagttcgctgagtcttttcttggtttgttgagtctgctattcagcctgttgaaataattctttgtgttgctcctttctagcatttccatttaactctttcttacagtctccattttctccaaaatttcacatctattcatggatattattcagtttttccactagatcctgtaacgtagtcattatcgttaaagtccctgtatgatagttttaacatctggatcacctgtgagttttgttggtttcatcttttgacagtgagtaatttttttcttaaaatgcatctcaactttttattgcagctggatattattgtaggaaaacagattaacagtatttaatctctggaattgagcgcacttccttttaatttagggtgttcgcatagggtagaggtcaagccagtctagtcaggagtcgaactaggttcatgttttgttgttgctcaccttacttgagtgcagtatgttcttcaaattcctttagtagtcggccgttcttactttatgcttagagtatgggtgctggaggactttccttagtgttcttgctttgacttcaggcttggacccgttcccgcacagctgtgggctttttctgtgctcttgctcctctcccagtggtaaattgttgttaacaaggaacattcctattacagttagcctgtagagcaaaatcccatttctaaacaatactcacacacacaaaaaagaaacttaaatatttcacagtgttgtattatattctattatatggagtggtgtgttagtttcctagggctgctgtaacaaagtaccacaaactagttggcttaaaataagagaagtttattgtttcacagttccagagatttttaagtctgaaatcaaggtgctcaccagggcatgcctctctctgaaacctgtaggggaggaggacatttttgcctctttgtagcttctggtggtcccaggtgttctttggcttatggtagcataattctaatccctgcctctgtcttcacatggcattctcctctgtgcatccccctcctcttataaggatacaagtcatattggattaaaaatctgccctactccagtaggacctcaccttaactaattatatctacaatgaccctgtgtccaaataaggtcacattctgaagtgctagggattagaacttaaacatagattgaaggagggcacacaatttaacccatgataagtagaaatgacatttatgtctcaaaaacattactcatatcagtaacattatctcctatagaaaaagatactaaaccacagaatattaaaagccaggctaagaatacactaacatattagaaagatttttgatacttgcttccttttcaattcagataaatttaaagatgcaagtgacagtttttaaaaatcacattttaatatgaaatgtacaaagtccaacgtatgtgtgtgtgtcactctcacaatcatccatcctcaaggtgaatagtaatttatcaatatctgtcaaaaggccccattcattaaaaaattcttgagtacctactatatactaggcatttgccatacacaaggaggaaacgtagtaaaatccaaagttaggatgcactgtacgacatgccacaatagttagattcagtggctgtattttaggtcttttcctcacccttagtgtataacttgtacctgataatagtgtttaacttgataacattttttttttctcatttgtgagacatgataaccatgacacaaattttattgctgcttgcttttgattacagaagggtaatggaagtgcagtaactctttagatttaaagccctgctcttagctaatgtgaagaatgatcatacttgtgctggaaactgctttgtgtgaaagatcatcattaaaggatttaataggactttaaagagtgggctgcactttttccagtggttggatgcttcataattaaatgaggaaaattgagatgtaaattatatttttagaagtgacagctcaggatgcttcataggttagctgttacttatgagaagagtgaaagatgagcttacacttagggatacacaagtttaggatagggaaccttttgagaattatttttaagtgaacaataatactcattatgataatgtaacatgaaggtatagagttaactatggaaaaccaatttatatggacttgtgcaatgatagctgttgtatttaaaatgatttgttttctaaatactactggaaaaataagtcagttgtaagatacttctaaagatgacttatgtcactggttttgctaaaggaacacattattatcatttattcctttgaatccttaaattctattaaatatttttaaaaaaatgcttttactgtgtttctcaggctgacttgtccaaagaaagaaaaaagctgtataatcaatcattcctatagtggtggttaatattttttgaacccagatcactattattgtaatacatgctttgcttttcttctcatatttggtaataatgtaatttctagtatacagattgtgtttatgccttgcaaacaattctcaataacacatgagcaaaaagctgtgttatagacaattcagaggaggggggtggaaggagaggaggagaagaaaagcactgtggctctgaaacacaaataggtaatttgcttttaattgtattgtgtttttattgcatcaaatttgttgaataagtttgtattttaatttattgaattatggaatttttgaacatttactagcttagtgtggataagaagccagctttcattcacagttcattgcaaataggtgccacatagtttctaagccctagtttcctagtatatgaaattcctaatatatgaatacaaggcttagtttagctattctctaagatgtcttcttctaagtaagtcctaagcatacatgatttatatttcaaaagcccagtttactcaggaattagaatcaaatactattcgagctttgcaatttaggatgggatgtactataccttcatattattgaaggtctgaacatttagatttgtaatcctaatgttcagttttctgagacatcatccacatagaaattgcccagtaatttagataatttacatctatgttatggaaaacaaaaatttggaaattagatttctaaatgagatttgaccaattgttcttggctggttcatctagctagttactctggcagtataagaattttctgtgatctgatgagctgattagcatacagtcctgttttccatctttataacaatacagtaaaactaagtggataaaactgttttgtttcattttagtgtggatttcctcaaaaattttcaaaattatgaacatagtatttctgaggtcttactatataattgtgtgtgtgtgtgtgtgtgtgtataccataagaaattacatattttaagttgtatcatctaatatgattcagcaacagtaataaagatgtgaccttagtttcagttcttatatttggaaaatgaaaatctttcaaattgtaactaacttcgtagctgtaattcctttgtgagtcatttattttgctgatctttgtgctatatttctgtagctgaatagtacagtgtggtagctactagccaaatttagctactgagcaatttaaatgtggctagtctgagttgagatgtaactgtaagggtataaaacacttggattttgaagatatattgtgaagatgataatacaaaatattttgttaatttattgatttgcatatcagagtgatatatattgaattgaataaaatattactaaaattaattttcacctgttttttaatgtgtctattagtaaatttaaattacacatgtggttcacatttatggctcacacatttctcttggacctcttctagagggtggttatattttatctaaggtgtcagatttagaatgacacgtattcttcttttaatttattttcattcttatgttcaaaagttagaaagtagtctaaagctgtttgtatgttctgacagttaagtaacatctgttttatgcaatgtagatggacacataatggaagttatgtttgaccatcacttgaccactttttgtaatgttgaattatattggtgtgccctagaagagagggaataaggaaaaaagaaacaaatcaagaatgaaaaaagggaacatgcttctggactataggaaatgccattaacaaagaccatagtaccaatattcaggaattacctattatgatttagagttacaccatatggttttctttaataagagctattatcaaagacataataacgttcccatatggttttcttcgataatagctgattttgaaaaccaatgacaaaaagttatatttagtgattttttcaacctgagggacaaaaacttatatcaatagaatatcacttagtttctgtttttttctcttacacagcattgtcatttgtgaaagagggagtgaaagttttcatattgtaaacttctaggacacagggaagttctgtaagctcctatatgatgccaatgagaataatcttggtttgcttaaaaagtgattgtctcttttccccatcccacccccatttccatgtttatttcttttgtttttttctgaaaagacatatttaatgtcctgcctaggtttattttctatttattcacaaaataaagaataacactgttatgttttgtatttgaaattgtaaggtacatttcttttttcttttatttttaatttaactctttgttttacagatgagggcagaagtgcagttgaccaagcaggtggtgcacagattgtaattgaccatttaaggtcactgtgcagtataacagatcccgccaatgagaagctcttgactgtcttttgtggcatgctgatgaactatagcaatgagaatggtaaacaaaactgaaaacttgctttatctctgggggaaaaattaaaaattatctttactatagtgcaaaacaaaaatatttgaaaaatgatgaacaaagaattcgtaagtggcatataaaattaataattagccaacattaaatttcaatgtttcaaaaatgtaaaatggttaatttactaaatgggactaatttttgaagggctgccagttttgatcagtatcaaaaacaaaaactccacagccctatagtatgatttaagcattcttactgtgaacattttaaaaataaacaatattaaaatagttttatcttcgttatatatataccaggagtagctttaaaatatgaacactgtttgcagaagtaaaattattttatctagatgctaggtttacttcgaataattttttaaaactctaataaaatctggctttagaaacaagttcagagcaactgtagagatctcattttagaaatttaattattgtaaacagcagtttcttttctctgtaaaacatttttagaccctagaaacaagtgatgtatcaataattttcagatagcctatatggttaattaaatgcatataaatctgtgatattaaggcttcacaatacgtttgtgtcacaaaatatccatttgtttctttatcatcttatgtgaatcactgtgtggatcagacattcaaattttggtatgttcctggtatgtaacacaaataaggtctttctgtggtttgtttcataatggcattttaagttgtgatattttggcagagacattttatttgcatattagacatgcagtattattctttactttcgtgtgttgtagaaacacgtggcccttttggcatactttttattttttttcacattttatagttgtgggtccaaagaaatattctcaataattcaaaaaaaaaaaaaaagataaaccttggcaataaatggctactgatatttggcccttgttgttagtgacaacagtgaatggtggggactgtggtaagttgaagagcccttgtcctattgaaaggggaaaaccactactcttctctagccagttgtttctgtatgacggtttggccaaatactgcccaatctttatattttggggatgggaggtgggggagaaagctgaaatgtctagtttgttatgtgacatctgagttttaaatgttggattacatatttttaatactatagaagctaaacagaaagtatcttcaggcctcatcctgtccaagggctaccagttttaagcctttgaattaagataatagagtttttattgatcaaatggcttacatattaaacttgagctaataataaatggtagtcttcataggataagttacatctgtttttccttccttctggtggaatcaattttgaagaacaaatgccctaaatataaatatgagaaacagaaaggacagagcctgagaaatccacaaaataaatacatatttcctaaataattgaaatttaaccacaatacataggtgtctgaattgcattaagaaatcattggtcagattttcatattgttttctttgcttttaactgcatttgggcttggacatttgaggaagtaggaagaacactaaatgggaaaaagttttagaaatataaatgaaagaaattttaagaagttattccagttttggaagtagtagaattagtcttgttatgcatctaacctagctgttagttctttgaggaagctgttaaaaaaaaatctgtatagaggtattaatatatcagatggctggtcttcaaaagcatcactatttccaatccaaagcagtgattgagtcccataatattatagggtatcccagtgtgtagagaagtgttctgagaaagaagattataattaacagcatgtggagtgcacagtctaactgtataatatatatattttttgaagagtaggcttttttctagagctcaggcattcccaagaaataacttagagactttagaaagctatattaacttttctctgaatattattagacaaatggtctttttcttcctttatttcaaaagctgcagtttgcagcttttaaaacttatcgaataaaaaagacataatcttgagtatttttaagaaacaaatgcgaaacttgtaactatcatcatctttcctctacttcctttttacattttgtctgtcacgagtgtcttaatttgtgaagtgattctttttcttctaatgttcactgaaattatatccttttatgtatgtttggcataattattaaagcgtctttattgttttgtccattatttgctttctcttttccttaaaatttatgtttgaagacttaaatattacatcatctttactgactcagattgtttggtattgatcatgtgtacctagataagtccctgaaacaaaaaataacagctttttgaaactcaggaggcactttctattagcactaataagtgaagtttctttttatatgtatttactatgtagaacatcagtatacaagactctgctaatttataagtaaaatattgagtgacaaatagctttttcctgctgtagtagaaaagttaactgccttggacccaataacttaagccgtatctgtagttaggaagttattgttctttagctgtatgtataaaatgtttaaagtatgcttataaaaaaaaagtactgagagtggtcacaaaaatccaccaacatagtttccctgaagagaatattttcaaattatttattagtctcaaaattgaaacttagaatgtcttgattcagaagcttcctgttcatacagtaaaactcagagcatatccactttttaaacccattaaataaggaataaaacaagtttcctaaacacatgcaagtcatatatgttatgaaaatattcagtaaagtcatttttgtaccatttgctaaagctgtatataattcataatttatcagtttcaaaagttttaaactagctcaagactctatacctctaagctatgagctggatatatacttttgtttccctattggtgaagcagttaatactcaggtaagtgtagaataatctgaatagcaaaagttataattgcttagccaaagaagttgtatcaataatgcataaataaaataatatttaaataacacaaaactttagtaaaaattgttttaaatttatccattttggaaaaaatatacatgtttttcacatggtgaaaaagcactctttgattctgtggctcatgaaaatagcctgaatatttgacaattatggctgtagaaaagcttgttgacactttgacattcagtttgagggaatgtgttgaacttgctatttttttttcttcattttgttacaactttagttattctataatccaaggaactcaaacctttaattgtaggtattttaatctcattagtttgttatctgtttcctagctttggttacccaatgccaaaacattgcagtgatgactgaaaattttgttcagtcatccagctgttttcaaatataacactgttttagcacataggagtttggaaaattttcattgattgactttttctggatacttattatcgtctaaaattttcattagcaaattcaatacttggaagagaaacatgttattggaatgcatttgcttcattaaataagttagaaccattacaaactctttcccactatgttagttgatgttccttatctacgtatgatacatggtggcagcagtaaggggcattgaaaacacactggtagtaacaagtaccagatctgtaattaaaaatttcccataggtgatccacaagcgtgttgagtctgcatttgtacacttgaattaattgcacgtttgaatagaaacaaaccagtgatctaaagcaaagcactaaagaccagaacaccaccttgttgacaaatctattggtagtcaccattgttgtaagtagatgtaattaatcaataaatatctcatggaaggtgtaattgagggtttaactttttctcctagtattgttgtgctagagacacaaatagagggaaaattctattataactcttaaagaaagtggtaaatgataagcattaaacactaaagttactattttacgtaagctatgccataagagagaaaagtagaggcaattgaaagatgccatcaggaaaggaaaaagtatcttctaaaattattaacatatgcagtctaggcttcttcatctgacctatattttatatatacatgtatgatatgtgtatatatgatttctacaaatacagccgatttttctaatattttaattactcctcattattgaaaaactaatttctctttttttgtagttcctgaaatctctctgagatacctacatgataattcttatatttatttgtcgcatgggctgatgataattaagctatggttgaagggaggccatgtatgtaatttaggaagtgtaacacctgtggcatattattgaagcatgacaactgagtttaaatattaagctcattgtttaaattcacttgtttaaaaaaggcctatactacttctccccatattaaagattatttaatgtgtaattaatcttagctgctactttcagtcaatagcaacaatttcttagttcataattaaaaactaaaaagcatgttggcctgagctgcatgtttatccttatgtttcagtattacaatactttattacgggtgaaaaagagcatttcctagatgtgttagatgtttagaaaaatgatttgcttcacatgagtgaagaactatttttaaactttacttactgtggttacaagctagttaataatttatatatttcctaaatagtaaattatttttaccttactctaaggaaaaagaacaaaacaatatgtaaaaggtaaaattgtatctttgcaatttattatcttttttaaagtttttcttctttctcagagatccttgttctgatactgtcttttttaatgaaactaattttccatcatactaccttacatgtattttatttttcctctatttatgaagacatgggagatgtacatttaagttaacatcttttgaagcccagtttgtcactttttactccagtgagttaaatgaagtgtgttgaagacttattgggcagctgaaaagtacttaggcttttttattctttctttattatactaactgttgttctttatttactgttgttctcttttttaaaaattcctgaatttttgctgtttgtccaacagctttctagtcagtttgctgaaaaaggttgctttcataaagttctaccacaagtgttattttaaacaaattgtttcactaaagaatagagcagttagttagtctggtgcctcttgctaattcaacctattaaatttgaccaattagaccaggttagcttttagtgataatcttcctagactatttctatgataatgctgttacttaatgaacaggctgagagcttgattttcagtagaggtgtatcagatacacattttggtctaattccacatgatcaagtattggcatttatattcagctttggccattagagaatgaacttctgaatgtaagaagctgaaattttatcttagaaaaataaaattattatagtctttttgtcagtaattttagcagtctaatacttaaaatttggcattatattattacaggaataatactttctcagcattgttagcttctagattgctactgcgattatgataatgcatttaatatcataataccacatagatgcccacttagttgagggcagtgaaagggcaaaatatgtttggagttgctcattctttagtatggttttctcatttttatttgctttatgtctggattgaagattaatcatagccgttatcaaatattattttcaagatttttctcattgtgaaaatttgaagtggaaaaattggttttctgattttgatttcatccttacaagatgtatatcaccattaattattggtgcattttaatataataatatgcatttacatttcaactgatagaatttcaacatataaagcatataggcaaattttctctttacatgaaatgcttacctatatttaaaaataaatattcagatagtaacaagtctgaaagaccaggtctttactgtaagtgttcctatactagttgaaatatgatgatatgaggcacataatcattgatcatgcacaaatttttaggttccagaaatgatgttgaagtaagcattgagctgtttggcctttcaaaagctgaggctaaaatcagaggtaaataataggttttagccagatatctgtatttgcgtgtctaatttaggccatttacaaagtccattcagagaggcgctgaacccagaaaagcatcatgtgtaaattaacttttatgaagattattaatcctgtttttttaactataagtaaaatccagttaatactgtactgcctatattgttttatttactaaaaaatttttaagtcctacttgaaaaactagaaagtgaaatgcttttgaatatgcagatgtatcttgttaacagaatttttgccttgcaaataacttctgtgcaattttaaactgtaaaaactaaattacaataatgccccatggtaactagaaaagttttttttaagctaatatattcttttgtaaaagaagggatttctatgtttttaagcatatgtttgtaagatacacgttggaatataaattaatttggcattagcttaacttgctgtacaaaaattcaggcttaaatttatacttactgtagatgtggtctttatctcagcagtgctgtatgaaagcagagactgaattggtttctcttaataaatgctgcttaagcaacagctggcagtagtcctctttaaaaaaaaaaaagacatttaacttaaaagaccagtttttttctgagatgaaagcgtagagttttctttaatcagaataaacatatctatagaatttttttgtagcagtattcattgtaacaaaagttgatctgtaacaaataattaacctgtagtaaatatggggaaaaattatctactagattaaggcataatcactctagttgtcattatattgagaacagtaaatgaataagtttcttaagaataataaaatatttttactatctgttgatttttgctttggcatttttttgttgttgcttctgttttacatcaatctcacacatataattttgccatttatatttaaaacttttacaaaagggaaattttgccatgtagagacaatttttattttcagaacccagaaagaaccttagaattatcttttctagttttttatttgttagcgactaggaagaaatgtataaatgtattgttttaaacctccaatattgtcaatattaatgaatgttggctttttttttttttgaaatttctatgtatcattgaaatgtataatggggcttaaagcgacaatctgggtgcaaaacacatgcatgtttgatataaagaaggctttaaaataattgaattttaaacacatgtaagtaatctagtttttatatcctcaacactaggcttagaataaagttctccactttataaacatttgagtatataaagtttttaaccactaatcatcctcttggtagccatatttaagtcagtttactttgcagtgttataatagagctaaaacttgcttgaacttgaagctctacttcagttgtatcgtttctaatttttaattttcatatccttttttggaaatacagatatgtcattaaatcaaaggtagttttcttcagtctttattatgcccaaatgatttttagccaatttgtattagaacttttcatcaagagttttatttgcttctttcactgtttcaactatgctcaactcatttgactgtagatgggatttttaatgcaagcctgtaaatggcaatatcatatcattatactgtgaataatatatctacgtactaatgtacagactgtattttgaattgtgtcttgtcttgtttttacaagttcattcttaagttctatttaccaaaaagcttaatcttataacattgtctataaggccttaggaataaggtaaacctgttataatcttcttaacaaacttatttttagtaacttcagttgaatcactggaattctcagcatacttttctggacctataatctagttataccaatgttttaaacattaaacttaaaactcaggggggaaaaggttcctcaacttgagatcttctctccagatctccattctttggagtttccatgagtgtgacctgaagaacttggaaccattgaaattcaaatgtaggtaggtaagtgttcacaccagcgcatgcgttgattgccttatatctctttgtatatgcatctgtattgcaccccctcagtgcctttcttcctcttcctccccatagatcatgtagggcctgtgtcattttgatattatgtaatttcgtaaatctgtatttggtcagtgtttgtctgtgatgtgtgtcaggagcagttaaaacagagtcttcggacatttatgacattgtgctgtctaaagactgtctttcacacataagtgtttgctatgtatgggcctgggttacatttttgtgaattgctgtgtttgttgagctctgataacattctcctggaggtgctgatattcactgagggaggcagaagtagtagtcttgcagttgcttcacttaatctgcctaatgtatctagagaacaagaactatttctagttctcagaatttcttcctgtttgtctttcgcttaaaagtcatactcctgataacattcatgataccatggatgtcagctattatcctttgaaaaacatttgcaagttttctttgggcaataaaaaagatgatcaaatgaatcatttgtttatgtcaataagaatatcaacttatcctacacaaacaggacccctacttaatcttttcaaaaaacagcaccgccacctactgaattgtaacatctacatagtaactgaaataggtagactcaatctggaatgatctcttaggcttaagtagagtttcttctcaaataagcatgatgagatgttaggagctttattagtgttatttctctgaaaatatcagagtgccaaaatctaggattcctaccaagcttttatctaatttttttcctgttatcacttctgctaagcacatcattgaacttcagaatatttaccatgtttcccactcacctcccaatctcttataaaaatgagatagccctggtgggcgctgtagctcacacctgtaatcccagcactttgggaggccgaggcggatggatcgcctgaggtcaggagttcgagaccaacctgtccaacatggtgaaaccctgtctctactaaaaatacaaaaattagctaggtgtggtggcaggggcctataatcccagctactcgggaggctgaggcaagagaagtgcttgaccctgggaggcggaggttgcagtgaactgagatcacaccaccgcactccagcctgagcaacagagtgagacttcgtctcaaaaatttttttttttaaaattaggtagtcctttgacactggttcttaaattttggtcttatgattttagatgtctaaaaattatagaagacctagaagactttttttatgtatttgggttatgtctgtcaatatttactgaattagaaatttaaatgaagaaaatatttaaaattatttagtatttcattttaaaataagaaacctattatatgttaacagaaataacatttttatgaaaaatattttcccaaaaaaattgctgcaaagaatagcagtttgttttactatttgtgatggtgaagaaaacaatggctactaatacaatttggtgccattgctggtgttcatgctaaaatgccagcagttttacctaccattgctttcgtaccattggtacaaatgtcaacacagtggcaagagcaaataaaatcttgggatttttatgaaaatagctttgactttgtgatcctctgaaagggttccagggacactttttgagaaccatattctaggaggcctctttctttgtccatgaagtggaaatttatatcaacctgtttctgtaaaagtgtgttttttttttctctctctctcctcctctggaccttcattatacaagtagaatggcaggcctgccagtcggtgtgaacaaattttagaattatttgagtatgattattgttttagttagcatcatagaagtagatagatataaaagagagcacccagttggtccacagtgagttcatccaactggatggctatatatttttctcttttgtgtggtatgtgtgttgtatgtgagtatataatgaatttggctcctgggtagttagacacattttcacgaagcaacatgattttcatgaattatggcaatacctacaatgtgccatttggctatgctaactttttctcccaatctgccataatttcaaatattactgcttcaatttgtatgccaaagattgtattaagcgctataacatttctttacttttcacccctcttttacctggaaccaaaatttgtaacattgtaaaagcagtccagaaaagtgatagatatgccaagttagcagaacatgaagagcattatcttctaagtggtattcttctgttatcttctccataaaatgtgttattcctctgatgtccctggactgttggatttttcatagtttgtaccaacagaactgagggggtgtgtgatgcttacatatatgcagacatatagtggagtttgactcacattcaatgcatgcgctagtgctcacgcttacatacctgaaatttaatgattcatcagctctgcagtatttgacaaagtagtgaaaatgaatacatatataaataaaaatactgctaaagaacaaggatcttcagaggtgaccctctagtaaagagccctatctactggtaagtaacctaaataatttctaacttggaaagctccttggtgcatgattattacaaatactataaccataatgcaactattctgccaatataatatagatataacactattgtgtaagtattttacctttaagtgttgtgaattattgctaaatttcatattcagaaaaaaatttaacatcaaaagtataaatacagattacttagttgagtatattttaattcttatctccttttagatttcataacttcattacaaaatttgaaattgttttattagagtatttgaactctaaacataaacttccatttttccatgtttattttttattcttattttggtaataggcccctttctattatagatgggctcccacaaccaaaccagataattatctgtaattagccagtcatcagttttcagggacactaagcctctgttgactatctcctcatacttcactctaaaagcaggaagaattaacaacaaagaccaccaggcaataatgaactggcatgtgagatagctcaactctgtatgttcttttctgaaaatcacccacctgcttccttatctatagattaagaactataaagagtaataaaaaaaattagcaggccaaccctgccaagggattggaactatgaggaacgtgtttttgtaagaaagttttgtctttagattgcaaagagaaataaaagaatttggggaaaattattagcttgaaaatggcatatcattttaaagagaaaaaaatttgtttagtctttagattgcaaagagaaataacttaaaagaatttggggaaaattattagcttgaaaatggcatatcattttaatgagaaaaaaatttttgaagagcatttctgtatcattggatgaaccagttatggacagttatagtgttttgcataaacatatgattttttgtatgtctttcttagcttattctaagaggcagtacttttggtgttcatttttggttcatttatcttcaactttgctacaggtattctattattattgtccatgaagaacccttgtggaaatccaaggcatgtttagtacttcaaaatcaattagtttcttagaaaatgaaggcaagcaatgatgacaaggccatgttaacctcattctcttcacctctctaagccagactttcctctctcttactgagatgatctgtcactataattaaataaaactttaaaaagaaaaatattttaggtaacttttttttctggtacatctcttcctagcagtcatcaagaacactctggttgcaaatattcagaaccaatcatttttgtgtatttattaaatatttttaattttgtattatgaaaagtgtttttaaaggattctaagatttttttctttcttggtcttcattaaacttgctacttttctcatgcttttcatattctgtgatttcctgtaatgcaaatgttactctaaatttttcactcaaaaactaatggtaatgtttgtttatacttattaaaagcctgctttttaatggtataagaccccatttagaaaactaatgatttgatatagtcttcaaactatttttatttctaaatgccttttggttattcaaaggattcaaaactaaactcttctgaactaatgtttaaaatgttcaacacaatcatatgaatggacttcattttctattactgtaatttaaataactttgagtttccaatagggaaaataagaggtgttttcttcttataatgttcatttgacatgtcaacactttcttttctgttgttgttttttttttgtttttacagattcgcttcaagctcagcttatcaatatgggtgttattcctaccttagtgaaattactgggcatccactgccaaaatgcagctcttacagaaatgtgtcttgttgcatttggtaatttagcagaacttggtaagtcttagtcatgaaccacaaatgtaattaacttattaatgtgcttacaataaatttttctgtagatattaagaagctagaaatccatttagattgtattagtttattttttgaagcatttgagatatttccatcaatattttaaaaagtaaatccaattagatcttatgattgcattgtttatgagagcgttttatttccctaataattaattttacatattaatgtttaaagctcacattgtacattatgtaacagagttgaatatttacacttgtctccacttgactttaatctttttacatgagggatggcaattgtatgtccacgggtaaaaataagattgaaatgtattgcatagtggcttgtgcctgtggttccagcacttcggaaggccgaggtgggtggattgcttgagctcaggaattcgagaccagtctgggcccatctttacaaaaaatacaaaaattagctgggtgtggtggctagtgccagtagtcctagctactcaggagaccgaggcaggaggatcacttgagcccaggaggcagaggttgcagtgatccgacatcatgccactgcactccagcctgggtggcagagccagaccctgtctcaagaaaaaaaaagaaatttattacatttcatataaattgcatttttctcaggtaaagaggaatctaacgttagactaaggttcttcatcctcttttcatgaaatctcaaaacatggcagaggacttttttctatgaatatatgtgttatagtattagaaaacaaaatctgtggaatccttgaaattcagaaggcaaacaaaaccagaccaatgctggaaacacatcctagtcataacacagaggaggatgatggcctcagcacctccacctcttcatttttctctttgttatggattaccctttcttcttccccacgcccccaccttcttgtcttccttcacaacccacaatcatgttaataataaattattatgggcatagtgaaatgaaatggtgttttgtcatagctaaataccgtagttacaacaaacaaatatatcaattctgttacgtaccacattctataaataaaagcatgaagtcactagtcttggtttttctaactgaaagctcatcttgattttaacattttacttttattttgtcttccaagcaaagggaatagaaattattaaagttatttttagtaaaagtcattcttactcaatgggtcatatcccagtatttgtgaatgtttctcatcttctctcttcatctgctttttcttttttatactagcctaattaacacattttttctgtcattcattcaagtgagaccaagaataaaagtacattcatttagtatttgacaaagttattcttttccgtgattaaaatggaatgtaggagtttgtgttcagtatggttggcagaaataaaacagaaattgtgttataatccgatactgaaagtgtaacagaaacatgattggttcaaatctttcttcacttgccttcagttttatgaaaatcaaagagtgcaggtactttgctgttacattttaatgtgagcagtttctagaacagcactgtccaatacagtagctaccagccatgtggcttaatgggcattgaaatatgaagtctcaattgagatgtgttcagtataaaatacacaatcgatttcaaacactatatatgaaaaatataaaatctcatcaatatttcatatgttgattgcatgttgacatgataatttgaatatattgggtgaaataaaatattaaaatgtttactttttaacttttttagcacatcttactagaaaatctaaaattatatatatggttccatttttgctctcattatatttctgttggacagtggtgctctagaaaatgaagtgcaacagaatcatccttcactctgttaaggccctcccttttgaagttttaggagagtacatagaagaaagcaaagattaatgaaatttatctcatctaactttaaggaaaagtcagtacaaagtaaggaaattacaataatccttggataggctgtgctgaataagaacttatataattgtagttgtttgctgaggagtatttcatccctttatggttttgtgtctaaatcttgtaaatgcttcaacattaggaactgtgcagaactcctgcttgacctcatgagaggagagttgtttgttaccccaagaaatagtcatcatccacttctcaaatgagagtcaaggaaaagtattagtcattattaccgcctcttatgaaaagagcataacaagaactgtggtaatggaagagggtgggctttgagtttagtcacaggagttacaggagtctttttttttaaactttaagaaacttattccatgtagtatgtccatataaggagtcttatgttttacagtaaaagaagatcctggatctgtatcaaaccttactcacctttacagcacccgtatgaagtaaactgggcctaatccttacagttaacccaaccctgtgatttatttagtaatactaatttaggatcatacatacagtcaagagcttctgtgagaggaaaattcatttatctaagttacgaacacatgaatattgaagtattttagagttctaagacaaataacttacatatttgaacccaaatacttcaatatgtaaatattggtataactcttgctgtgtgtttaagacattataataatataaatatattaacatttctccaaaagtgccttgcataaacccagattccaaattgttcacgttagggcaatagttttcaaactttttgactatggcccataataagaaatacatgttcttatcaccacttattgtattacacacctgaaactaaacaatacttattatccttaacatattcagtgtactctgatcctaaactgatcacatgacttagtggatctctggcttttgaaaaatacagcattataggatttctattattcataaatcatttggaaggcagtcttttgtattagagaaaaataattcttgatgtacattctttttaaaagagaacttgaattctgacacaaagcatctttaagtgatagttcaaatagtttaatttctgattttagtatctatagttatttttactatatatataataggcatagcttgtctcacaagtttaattaaaacatttggtttattcaacttttaaaagtcattaggcaattaaaaattttaatggatatgtcagaaattctcagtgattatgtttgctttgctgagtataaaagaagtttttcttacataataaatatatacttgctaactgatgttttaaagtttccataatgtataccatgccagcctgtgctttctcactaagcagtgtttttactgagccctgtgaactccagagatacctgcaaaagtattgttggaagagtcaaaggcagggaatggtttaatatttaatccagtcattttctcatttgggaaaaaagtgaaaggtttttcaaaagctaaaaccccagaaataagcagaagtatttgccctatagctctgtcggtcagctctgttaaccaaccctttttaaacatagatactctttaggatagccaaagttatcaaccatccacctcttatactttccattctgtgcgtcttttgagtatctcaatggatagtgcttgccacatattattaaatgaataataatatgaatgacccaatcaatactgtaatatcaatgacatttgggaaatgggagtgtatgaatccatttgcactaccataaaggaatgcccaagactgggtaatttataaagaaaagaggtttaattggctcatggttctgcagggtgtacaggaagtgtggtgcctgcatctgcttctggtgagggactcaggaagcttacaatcatggcagaaggtgaagagggagcaggcgtgtcacatggtgagacagggagcgagagagagagacaaaggggaagtcacagactcttaaccagatctcatatgaactaactcacttatcaccaaggggatggtactaaccattcatgagggacctgcccccattatctaattacctcctgcctggcctcacctccaatattggaaattacgtttcaacatgagatttggaagggacaaacagccaaaccacatcagggagttttcattggacaaataaggaaaaataatatgaggacaaaagcagagcacagtatactgagggagccctggcctggtaggagagaaaagaggtaagtaaagagttgcaaagacaaccttgtctaccttgctgatttctctggtatacagggaaaataagccattgaaaacagtttgatacaagttgctgtgctaagatagcagatttgtttgagaggctgcgtagaccacctctattcagcctagtctcccccagtctatgttaaaagataaatatgcagctaatttagttcagcccaggttcatactataatttcagtggttactgccctaccccatttggaggaagaaaggataagagaaaaatatgtgtatctaagacttctcgagtttatataatgagtcagttatgcccatgtaatagctaggttgtatacatcaacacgggagtggaacatgtatgcaccagaataatgtttctcctttcagagtgagctttcttgcctgttaacaagtaatgtatttttattgattcgtgtaaatatcaagtgtttaaaattcatgtcacatacttctgaatatgacatattactaaatgctacagttactttttgtcaaaatgtttttaataaaagtgttaaataacaaatttgtgtatttttgctgactagtgatgagatgtaatagcttaaagatgaaatggaaataatttaacaagtgcaatctatttcagaattgggacagaaaggaaaatacagctctgctttattaagtttcataaattttacaggattaaagatgttttcattttttcccaataatgaaaaaaagattgttttcctcctgattgttatttatgcacaataatattaaagagaaattggcctttaacccaacactctttaatataaccatggaatttttttttgttcccttcgagtcccaatgaatgtgtttacataatttttcatacttaaaatcatagcatgaatatggttttaaagtatgcattcttatttaacatggaataaacagaatgagactttgcctcttttaaaattttagttggaaactaactaaaacccttcagtaaagagatttcttcttaaaggcttaagacctcaaggattgggagcccaaggcaggaagattgattgcagcaggaatttcaagaccagcctgcgtaacatagtgagacctccccccgacccactctctaaaaacaaaaagcaaacaaataagaacaacctcaagggaagggaataaaaaagaaaagcaggagagaggattgtacgagaatattttgggacctgggaagaaaggcaataacttacatagcaaacctttgacatctgaatcctggataagaaaccaagaactaaccagtttgcatttcacagtcttcaaaaggcttgggatttgatggcatcaagatttctagaccctctttcccctttcacaccttgtgatgactaccccttgcctatccaaggagaatgctatgcttcttgtcaggatggacgaaaaagagggtttcttgatggaggatatgacactaaattgaagtaaaaggtaccacagtaccaatccataaacagattaagtgaaatctgaatgccgagaaccacagttttattgccccatttgtctcccagaacgtagacttaaagttatttatattgagggttctctacaaaaggccagcagatgaccctatagggaatcttgcagtcaacaagactactcgtactcatagctcctaatcagtttattattattattatttttagttcctaacttcatcaatggcagacagctcaagaggtgagggcaatctctaacatggaagataaatagagaaaagcaacagtacacttttcttaaggagaacagaaaagagcttgagcattaagaataattgctaagatgaaagacaaaaattggagaaatagttgtacgagtaaaggaaaaaaaaaaggagatagaaaataaaagagaaaatataagaagatcagaccaagagtattagaaaagttaacagagaggaggaaattgccaaataagtatcacagaactgaaatacaaaatttcctacattgcaaatatctgtcaaataaatgtcctaaggaatgaaaatacacccagaccatagcgcatcaatgtgaaattttacaatgctgaggacaaagaacatcttacaagcttctagagaggatgggggaagtaaagttgaatacaaaagatcatgagtccgtggacatatgtctcaaaacaacattggcagccagaagaaaatgcaatgttgccttcaaaatttttagggaagccagatcaattaggcaaggaagaaataaagggtgtcaaagttggaaaggaaaaagtcaaattgtgcctgcaaacatgatcttatatcaagaaaaacctacagactccaccaaaaacctcttagaaccaaaaaatgaattcagtaatgttgcaggatacaaaatcaacatgcaaaaatcagtagcatttctacacactaacagtaaactagctgaaaaggagatcaagaaggcaatcctatttacaatagctataaaacatataggaataaacttaaccaaggaggtgaaagacctacaaggaaaactacaaaacactgatgagggaaactgaagagaataccagcaactagaaggacatcccatgcttatggattggaagagttaatattgttaaaacggtcatactattcaaagcaatctgcagattcaatgcaatccctgtcaaaataccaatgactttttttttgtggagatagaaaaaagtagcttaaagttttcatggaaccacatgtaaaacccaaactataaaactagtaggcaaaaacaaaagagaaatgcttcaggacattggtctaagaaatgtttatgtataagacgtcagaacacaggcaacgaaagcaaaaataaataggatcatatcaaatgaaaaagcttttgcaaagcacagaaaacaacagagtgaaaagagaggctacagaatgggagaaaatatttgcaaattattcatccaactggggatttattccagaatatccaaggaactcaaacatctcaacagcagggtctcactctgtcacacaggctagagtgcagtggccaccttagcctcccaagtagctgggactacaggcgtgcaccatcatgccccatttgtttttgtattttttgtagagacagggttttaccatgcttcccaggctggtcttgaactcctgggctcaagcagtccacctgccttagcttcccaaaatgctgggactataggcgtgaaccactgtgtctgccccagtcccatttttaaaatgggcaaattatctaaacagatacatctcaaaagaagatacaaaaatggctaaccaatgtatgataaaatgttcagtatcactaatcttcagggaaatgcaaatcgaaaccacaatgacatattatctcaccccagttaggatggctattattaaaaagacaaaagttaacaaatcctggtgaggatgtggagaaaaaagaactcacactgggagtgtcaactagcacagccactagggaggttcctcaaaaaccataaataggccagatgtggtggctcacacctgtaatcccaacactttgggaggctgaagcaggaggatcacttgatgccaggagtttgagaccagcctgggtgacatagggaaaccatctctgcaaaaaatttaaaaattagcctggcatggtggcacaggtgtatagtcccagctacctgggaagctggggtgggaggatcgcttcagcacaggatgttgagtcaggttgcagtgagccatgatcacaccactgcactccagcttgggtgacagagcaagactccatctcagtttaaaaaaaaacacaaatagaactactgtatgagccagctgtctccttactgggtatttatcaaaaggaaaggaagtcagtattgaagaaacattacacacccatgtttactgcagcactgttcacaatagatatgggatcaacctagatgcctaaatacatgaagaggtaaaatgtgatgtatatgtatatacacacacacacacaatggaatactattcagccaccgaaaagaatgaaatcctgttttcttgcaacaacatggatggaactggaagacattatgttaagtgaaataaaccaggaatagaaagttaaacactgtatgttctcacacatgtggaagcttaaagttgattttatagaagtaaaaaaaaaaaaaaaaaaacggatactagaggttgggaaaggtagcaggaagagggataatagggaaagattagatacagaagatacaaaattacagctagataggaggagtaagctttagtgttctgtaccattgtaggataactatcgttgacaataattattacatagtttcagatagctagggggaggatattgaatgtttccaacacaaagtacttgagatgatgaataagctaattaccctgatctgcttactattcattatatgtaacaccacagtgtaccccatatacaattattatttgtcaaataattacacttttttattttttgagggaaaatgacttccaacatagaatcctatactctgtcatactatcagttaagtgtgagattataataaggatattgtcacacatgaacatctcagaaaatttcttaaatactttatctctggaagccactggaagttgggttccaccaaaacaagggatttaaatgaagaaaaactacataggagctgaaaacgaaatccaacaagaatcccaagtattacagtgatgttatcgtcccatgtggcatgctttcaagaagcaaccaatccaggttgggttaggtcaaaaaactggtgggatggtgcttaggagagttcttacaggaaatgaaattgattaatatctaaagtgaatgcattaagattagaaaactgctggagtgtttggagttgcattaataacaagcacatagctaagcaaatgaggaaaacattattccaggaaaaatgaattagtgtattactgaaacacaactagtgatataaacaaaattacatataattagaaagatgatggagagtatggtgaacacaggaaagaaagaaaactagtgtttcatctttcatagtagaaatttgatcagaaatgccaaataaactagcagtacaaatatgtagtttagataatacgtaagtaaacagtatgaattagctaaaagagcttcatgtatttgtgaggaagaagaaatggaggagaggaaactggagtctgctgataatattaggctaactctttaaattcatagagttgtaataaaaataaaaccttagtaaatgaggcttcttgccaaaggcctgttgaggatccatggcacttaattgatagatataatgtccaaattatacttcatgctgtcttttcactctgttcacctgcaggttaagtacagattttgttctataattcctatattaataatggtgcataatttccttatactggcaaacagagcctgagttacatagcaacagtgatttggtttccttttattaagtgtttggaggaaaagaatgtggattggaaggaatagagtaccaatactattattttaaagaagagtaagaacatgtaactagatgaatgatgatgtctatatactttacctatgattttatgtttttgaaatccatctcacttggacaattctctgaagcagagggataaccaacaaagttccagggataaatcatctctacttactttttatttattttttttctttttgggacagagtctcactgtgtcacccagactggagtgcagtggcatgatctctgctcactgcacctctgcctctcaggtttaagtgattgttgtgcctcagcctcctgagtagctgggactataggtgtatgccatcacgcccagctaatttttgtatttttagtagagacagagttttgccatgttggccaggctggtctcaaactcctgggctcaagggatctgcccaccccagactccggaagtgttgggattgcagggatgagccaccatgcccggcctcatctctaaatgaaacctcctttttgggtggagtgtgctgacatttgctgaatgtggtctctgagggtttcagtatcttattggaaaagacaccctacccttactttttttcccccttggcatgtgaagtaagagctaaagccgtagttttttgtgacattaaagaatcatacttaaagtcttggagtggatttttgtcattttggaatagatccgttgacaatgtgcaccaaagcagtgtaataaaatgttgatcaaaactgtatttaaccatattaatgtgtgtctctcctgttaaatttgcaaatttcttacttgatagtaacacaagagatttaccagagactagcgagcagaatgtaaccctgataattcatttacatgttcatttactcataaataacttcattttggacacctgctttataccagggactattctgtgcactatgtttctggtggttgaagcagtatgtactgcccctgccctcaaggagcttatagtttagtgtgtaagatggacatttattttaaaatagtttgcaaataaactaacatataattacaagttattataattgctagtatgagaaagtaatagagtaaggtaagggattaatttaaattagaagcatcaactctaggtgggaaagagcattttcagacaatcagtattttcaaaatgtctacctcctacatacacattatacagtagctttctcacgacactgctggaggatgctgccatcaaaacaaaacaaatgaaagagaaaaggcatagataacagggtatctagtacaggaaggagagataatgataaagataacccaggaggccagctgtgctaccagagagaccagtatatattagattaggtcagaattcactgaaagaaacttgtagaaaaattaataggatacttaatgcaaccaaagacattgagaggagaattggagagaaatggaatggatttgggttggattttggaggtagattgacagaccttggtgatttattagatgtggaagttgagtgataataaatgagcagtgactcctagatttctgcctgtgcagatagacagagtgttcatatactgagttgaggaaccctggaggaggaagatttcacagtatgtcaaaagcccctttttggtattgagtttagaatgctagagagatactcaagtagaggtgtcaaatgggcagttaaatagcctgatgtccagaagagggttatgaatatttatgttgtataaatatcaacacagagatgctgtttggtgctatggaagagcattggatagcctcaggtgagaataaggactgagaaggtaaagcaaaggatgaatcctaaggaactagaatttatacaggtcttgtggaaaaggaggaacaattataggagattgctaagtgtagaggcaggtaggccaaaactagtagatttagtaatgcatgtgagttgagagagtagaggcagtgtatgtaagcaatgttatcagaaacttatttgtaaaagcaaaaatgagcttgaatggtagttgatagaggtggactagggggaggatgtttgtttttaatattgttttatgtgagaaataccaaagtatatataaatgctgatcaatggtgaggctctaggagaggttggagatgctgagaggcaggaatgaatgaaaccccaattactcatgcagaattagtcttcaatagtagatatgtcaggaccagtgtagaaaacattccactttaatgatactaaagataagtcacctttaattcatccatataaaatatgttatgagaaatttttctttgactaaaatccttaaaactatgaatttatgacttagtaattttgttgttgctgtggttactagagaacctttttttatagctcaaatataattgggtcagaacattttctctaaagccttagatatttttccttttcagggacattaaaaatggatttgattgttcccatatttgaagagtatttgtatttatcagtaatggtacaaaataactaagtattgaaagtattagaaaacagtttctggactttatttggtttaagtttttcttttttattttacagagtcaagtaaagaacagtttgccagtacaaacattgctgaagagctagtaaaactcttcaagaaacaaatagaacatgataagagagaaatgatttttgaagttcttgctccattggcagaaaatggtgagaaacttaaatgcacctttggatttttgatcatgtatgctttaaacttttttcctaatattatttaattgccagccatttgactcaaaaccattctttattagtgatatgttttattttgcatatctctaactttagctatgttatctactccatagctatatctacattggccaaagcaactttccaggttcctttgattttaaaatcttagaaaagatacttctgtagctaacacattcttgtgccattctggaaaaggcagctgagaggctgagctctacttctacacacttgtaaggcaaaggggataaaagttggagtctcaggcctgccaacagtgaagatactggttaatcactcccttctttgggcagaaaaatcttaagagatgcatcgtagaaataagaatgaatcagaagaaacaaactattccatattagtaatttttcaaatataatgtctaacacgtactcaaagaggatcagatattaatacataagacaaaacacactgtaagcaagagtaggcagcaaatcttcagatactggaattattagacactgattcaaaacaggtgtgcttattgtgttcaaagaggtaaaagctagcttaaataatttagaaggaaactaaaaactatttttaaaaagtggcatagcagatttaagaatgaaataaatggaaatttctgaattgaaaaatacaaccaaaattaagaattcagtgggtggtttaatagcagatttaatagatactgttgaattaaagaaccagtgaactggaaaacgggttggaaagaaatccaatatgaactaaaaggaaagaagaacacatttacataaaagagaataagaggtcagaggaaaaaatgagacattctcatatgcattttttggagtcccaaaaggagagtagagaaggtggggaggggagtgtgcagaggcaatatttgaagaaattttggcagagaatttatcagaaattatgaaaaatgcaaagatccaagaagccctttgaacccaaaatatgataaacaaaaatccacatctagatgcctcatactgaaaatgtagaaaaccaatgaccaaaattattatcttcaaagtaacaacagtttggctgacagctaccttctcaacagcaacaatgaaagccagatgttataaatgtggtttgtcagaaggaaaatgatatagatgcaggggagaataaagaccaaaaaaaacggtagatatataggtaaatcttataaacattgaatatatcaaaaaaataacttattgtgaagtttacaatgtacatttatgtgatttaaaatataccacaaactgagcttataaataagaagaaaggtaaaaggagttagagtcctaagacacttgtgttatctggaagactctggttatttagtcacttttaacttttaaggtgactactaaagtaattttttaaaatgatatatagctgcagaacaaatggaagcgacttatggaaaggttttttaataccctagtaatgcaaaacaagaaaaaagaggaaagaaaaaggaacacgaatcatagaggacaaatgaagcataaaaatacagttttaagacacagtatttcagtaattacgttaaatgtggcctaaatgctctaattaaaagaccatttgtcacttgtgttttaaaataaataactatactacttaagcaatacttattaaatatgagatttaaaagattgagaataatagggtagaaaaaatataccagtgaaacctaaggaaggctggggtagttatattaatatcaagtaaaatagattttaagatgaaaagacttgctagagataaagagggtgactttagtaataaaaggtccaatttacctagaaaaaaaataaccgttatacattatcccaaaacatacggagcaaaaacattcagaactatgaagagaaacagacaaatccacaaatattgtgagaaattttaatacctctttcaataatttatagaataagatagaagaataaggttatagaaaatttgaaaatgattaagacaattgatttaatggacctattttagaacacttcaactacagagctctttcaagtacatatgaaacatttaagaacatgtatacttgtcatgaaagaaagaaatttcaaaagattgctatcatacaaagtatttctttgacctaagtgagttgtctagtaaccaattataaaaagaaaaccaggaaatcgctgtatgtttacatggtaagaaatatacttccagtacctcagaggtcaaaaaagaattgtaatggaaattagaaatttttctagtagtgaaaatgaaaatgctatatctcagatcttacgtgttacaagtaaagacctattcagagggaaattttttgctctaaatgcttatattagaaaaggaaaagaactaaaatcaatgagcccagtattcatctcaggaatttaggggaaagaaaatataaacccaaaaaaccacaaggtaatttttcaaccctcaccttccaatttgtgtgaatatgctcatagtagtctctgataatcttttgtatttctgtggtagcagctataatgtcacctttattgtttctgattgtacttatttgaatcttctctctttttttttgttaatctagctagtggtctattaattttgttaatctgcacttgtactccctaaatctacaaaaaaaaattttttaagtagttaactggaataaaatacaacaatgttaacaaaatccaagagtaatatatattcttttaaaaagcagaagaaaagatagggtatcaacctaagtgtccatcagtggatgagtggataaagaaaatggggtgtgtatacacacacacacacacacacacaacatggaatactactcagctataaaaaagaatgaaataatgtcttttgcagcaacttaaatggaactagagggcattaattctaagtgaagtaaccaaatgccacctattctcacaagtggcagctacgctatgtgtacacaaaggcatagagagtggatagaatggactttggagacagagggaggtagtgagatgagggggtgaggggtaaaaaactacttattaggtacagtgtacactattcagatgacagatgacctaaaatcctagactttgccactatacaattcatccatgtaaccaaaaaccacttgtaccactaaagctattgaaattttaaaaaaaataataataagcagaaggaaggaaatgtaaagagctgaaataaaatggaaaacatacagtgcaacacaaacatataattactacagttgagtctgaaaagacagtggaattggtaaacccgtagtgagattaatgatgaaaagagagagaaagcataattaaccaaaattaagaatgcaagaggaggagaccttaccgcaggtcttacagctattaagaggatattatgaacaatttgatgcccatatattttatatatatatatatttttttttttccctcccccgcaagatggagtctcactctgtcacccaggctggagtgcagtggcaccatctcggctcactgcagcctccacctgggatgcagcctccatctccgaggttcaagcaattctcctgcctcggcttctcaagtaggtgggattacaggcgcctcctaccacgcctggctaatttttttatttttatttttagtagacacggggtttcaccatgttgcccaggctgatctcaaactcctgacctcaggtgatccacctgccttggcctcccaaaatactgggattacaggcatgagccaccgtgcctggcctgatgccaatatattttaaagtatgactgatacaagaatagaaaagctgagtaatcttaccttaagaattcttccagagaataggaaaaggaaatatacttaccaatttattttaatgaggctaatgaaacctttataccaaatcccaacaaagacaatacatgaatgaaaattaaaggctagtctcaccatgaacatagatccaaaattcctcctaaaattttagcaaatttactctagtaatatattaaaaaaattaatcacaccaaattgcatttattctgaaagtgtaacacaatttaatatttgaaatgcaactagtataattcatcaccttaaaatatttaaggggagaaaccatgatcttctcagattttaaaaaaagcttttcataaaattaagtgttcattcattatttttaaaaacttaggaaaacaggactaggaaggtcttcaatctgaaaaagatatctatgagaaggctgaagaaaacatcacaatcaatggtgaaataaaaaagcatttgctttgagattgggacaagaaggatcatccccgcttccatttaacattgtattgtaagaagtatccagtgcattaaagagaataaaagaaaaaaaattaagataaagcaataaaactctcattcatttatgatgtgattatgcatatttaattcaaaagaatctatagatcagttttatagatctttttttaaatcagaattttgttaggttactgccaaaaaacaaacaagaatttctatataccaaaaaagaaaaaacagaaaataaaatgtgaaaaatacgttggatagcccttttagctggaactgccaccttccagtaatttaacaaaataatgaacacaaagggaaagagaagcatctgatatgtattctgtaggccttttagaaaatacggagttgttcctttagccacatacattcaaatctacaggaaaggtgatattgtagacatcagaggaatgcatcctgttcaaaaagggaatgccccacaaattttaccatggaaaaccaagagtctatggtgttacccggcatggtactagtgttgttgtaaacaaacaagggcaagattgttgccaaaataattaatgtgtataatgagcatattaagcactcaagagccaagatacctccccgaaacacatgaaggaaagataggaaaagaaaaagaagggagccaaagagaaatgtacctgagttcaactgaagcaacagtctgttccacctagagaagcgcactttgtgagaacaaacggaaggggcctgagctgctggaacctcttccctatgaattcatggcataataggtgttttcaagataaaaggcttctagactattaaaaagtatataaaaaattaattccagatagattgacctaaatgtgaaagttaaaacttcagagggtttatcttaaaatgtaagctaggagaatatcatcatggccttgaaatacttttcttagatcacaaaaagctctaatcataaaggaaaaaattgagacattggttactttaaaagtaaaacttctggctagcctggtggctcatgactgcaatcctaatggctttgggagggcaagacgaggatcacttgagaccaggagttcgagaccagcctgagcaacatagtgaggcctcatctctaccaaaaacaaataaataaaagttaaaactctttttttaaagacaccgttaagagtgaaaagcaagactggatgagagaatataattataacatataactgacagagggcttgtgtatacagtgtataaaaactcttaaaaatcattaagaaaaatgtgaaaaacattttaataagcacttgacaaaagatttatattaagtccaacagacttaatatagatatgaaaatgttcactcttaggtaacacaaaataaaaccacaataaaataccactatacacccactggaaagtctcataaaccaactgttgatgagggtgtggaacagtgggagtgtaaattggtacaattgggaagtagtatctattgaagttgaagcaatagatccaacaattctgctcttagaaatatacccagaagcttgtgcacatgtataccaggaactgttacaggaatgttcaaagcagcattatttataatgaaaaattggaaacaaccaaaatccattaacagtagaatgaataaatcataggatattaatataatggaaaaatatagagttatgaaaaggaatgaagacagctgtaaccattactgtggatgaatctcataatgttgaaaggaaaaagccaacactgaaaaatacatattgtatgattcaatttatataaagttaaaaacaaaaagtaaaactaaactgtagtttttaggaatgattatttacttggtaaaatgatgaaagtatagaagtgattaccataataaccaggatgatttgagacaaatgaaggaaggggtttgttatcagaaacagaaatgcagagataggcttcctgagttgttggcaatgaatttcttgatctaggtgatagatacatggttatttgctttctaataatatattaaacttaacttggatattttatgcacttctctgcatttgtggttttctttcactctttaaaaaaagttttaaaatacctatatatgatgcatacatgatacatacaagtgtacattcatacatatgtgtgtaaacagtggtgataaagatacttgtccttggacagaatggttttggtaaatgtgctgggctgtctgctttggcagaatgtcttgctaatcctaattaaggtagtttaagcctcctatatatttgttttcaggtatttgatttcagtcaaattgtgagaagagattatctgtaaactttaacattgagacatttaggctgggagtgatggcttacgcctgtaattccagcactttcagaggccaaggcagaaggattgcttgagccaggagttcaagaccaacctgggcaacacagcaagaccctgtctcaaaaaaaaaaattaattaaaattttaaaactacaatattgacacatttaaaatttcttaaatgtcttaggtcctatttcttagggagaaatttgttttttatctcattggtgttttggcaaagtaaaaattttactgtgaccttcagtcaattttaggccataaaataacctataactttccttgcagtatttcaaaataacaatgtgttgatatttattactgttttcccctctgccttcacatctgttttataattgcacaatggataggatgataccattgaaggcttgtttttggactaattctttgcatgtatcatccttcattttcccagtacacgaaggagagtgatttcagcattagaagttgggatttgtatagttcaaggattttagtatttttaaggctttttcatcatagtttttaattctagtcaccacacatctctagccctagcattctgtaaccaaggaaacgccctacttttagcatggcacagtacaagtgtaccttttaaagaaatattccaggttgaatactctgtgtattctgagataatattcaaaagaagatcagtgatcctagtgattcaaaaaagccaaattttaacacattaaaattgcctgaaagtcttaagtatttatttttaaaagtctttatttttcctaaatgataagctgaagctgccattgccatatatggatgcatatacagcttagggaaaccaatgactaaaataaaatccaactgaaaaaataaagtttaaatttaaaaatttctggccaggtacagtggctcatgcctgtaatcctagcactttgggaggccaaggcaggaagattgcttgaggccatgagttcaagaccagcctaggcaacatagtgagaccctgtctctacaaaaaaagtttaaaaattagccaggcatggtggcatgcacttttagtcccagctactcaggaggctgagataggaggattgcttgagcccaggagttcaaggatgcagtgagctatgatcataccactgcgctccagcctgggcaacggagcgagacactgtctcttaaacaaaaaatctgtgttgcaaatgtatttttcaggtgagttgactagcatttatcttaaggagtatcaactacactcaaagcatttagataggccagtttaggttaagatacaaagatgagtaaggtgtatctattgggggaaccagcccccaatatttcaatgtatgttctattttccctaaatgtcggcccatctgagaaatagagaaagagtacaaaaagaggaattctacagctgggcctccaggggtgacatcacatatcggtaggtccgtgatgtcccctgagccacaaaaccaggaagtttttattagggatttcaaaaggggagggagtgtacagggagtaggtcacaaagatcacgtgctttacagggcaataaagatcacaaggcaagggcaaagcaaagatcacaaggcaaagggcaaaattagaattactgatgagggtctatgtttggctgtgcacgtattatcttgataaacaccttaaacaacagaaaacagcgttcgagagcagagaaccggtctgacctcaaacttaccagggcgggatcttttccgcaccctaataagcctgagggtactgcaggagaccagggcgtatttcagtccttatctcaaccgcataagacagatactcccagagcggccatttatagacctccccccaggaatgcaattccttccccagggtattactatttttttttttattatactttaagttttagggtacatgtacacattgtgcaggttagttacatatgtatacatgtgccatgctggtgcgctgcacccactaactcgtcatctagcattaggtatatctcccaatgctatccctccccgctccccccaccccaccacagtccccagagtgtgatattccccttccagtgtccatgtgatctcatcgttcaattcccacctatgagtgagaatatgcagtgtttggtttttgttcttgcgatagtttactgagaatgatgatttccaatttcatccatgtcactacaaaggacatgaactcatcattttttatggctgcatagtattccatggtgtatatgtgccacattttcttaatccagtctatcattgttggacatttgggttggttccaagtctttgctattgtgaataatgccgcaataaacatacatgtgcatgtgtctttatagcagcatgatttatagtcatttgggtatatacccagtaatgggatggctgggtcaaatggaatttctagttctagatccctgaggaatcgccacactgacttccacaatggtggaactagtttacagtcccaccaacagtgtaaaagtgttcctatttctccacatcctctccagcacctgttgtttcctgactttttaatgattgccattctaactggtgtgagatggtatctcatgtggttttgatttgcatttctctgatggccagtgatgatgagcattttttcatgtgttttttggctgcataaatgtcttcttttgagaagtgtgtgttcatgtccttcgcccactttttgatggggttgtttttttcttgtaaatttgtttgagttcattgtagattctggatattagccctttgtcagatgagtaggttgcgaaaattttctcccattttgtaggttgcctgttcactctgatggtagtttcttttgctgtgcagaagctctttagtttaattagatcccatttgtcaattttgtcttttgttgccattgcttttggtgttttggacatgaagtccttgcccatgcctatgtcctgaatggtaatgcctaggttttcttctagggtttttatggttttaggtctaacatttaaatctttaatccatcttgaattgatttttgtctaaggtgtaaggaagggatccagtttcagctttctacatatggctagccagttttcccagcaccatttattaagtagggaatcctttccccattgcttgtttttctcaggtttgtcaaagatcagatagttgtagatatgcggcattatttctgagggctctgttctgttccaatgatctatatctctgttttggtaccagtaccatgctgttttggttactgtagccttgtagtatagtttgaagtcaggtagtgtgatgcctccagctttgttcttttggcttaggattgacttggcgatgcgggctctttcttggttccatatgaactttaaagtagttttttccaattctgtgaagaaagtcattggtagctttatggggatggcattgaatctgtaaattaccttgggtagtatggccattttcacgatattgattcttcctacccatgagcatggaatgttcttccatttgtttgtatcctcttttatttccttgagcagtggtttgtagttctccttgaagaggtccttcacatcccttgtaagttggattcctaggtattttattctctttgaagcaattgtgaataggaattcactcatgatttggctctctgtttgtctgttgttggtgtataagaatgcttgtgatttttgtacattgattttgtattccccagggtattattaatattccttgctgagaaaagaattcagtgatatctctcctacttgcacatccgtttataggctctctgcaagaagaagaatatggctctattctgcctgaccctgcaggcagtcagacctttggttgtcttctcttgttctgtaaaatcactgttattctgtttgttttcaaggtgcactgatttcatattgttcaaacacccatgttttacaatcagacttcatatttttcaagcacacatgttctacaatcagtttgtacaatagtgatcctgaggtgatgtacattctcagcttacaaagataacaggattaagagattaaagtaaagacaggcataagaaattatgagtattatttgggaactgataaatgtccatgaaatcttcacaatttatgtttttctgccacggtgccagccagtcccaccatttggggtccctgacttcccacaacatatatctgctcaggagatagatggagacagatatggaggcaaatataagctcttcagtgaaataagtgttataatgaaagaatacttaaagatattagaagtataataaaaagtgttgatgtgggggtggagtttcctatgaagatcagttttaaaaatgtaattgggatgtaaattctgtctctaaaataccttatgttatgtttagccatcagaaaggttcaaggttatttttttcttttaacttttattatgaacattttgaaatgtattcagaaatagcatttagtaaaccaccatgtacccatcactcaagaaagctttaaatcaatgaaaacctgaagccctttttaaaaacacgactttatttatttatttatttaatttttatagacagggtctcactctgttgcccagactggagtgcagtggcacagtcatagcttactgtaaccttgaactcctggcctcaagcaatcttcctgccttggcctcccaaagcactgggattacaagtgtaagccaccatgcccagccctattttatagtattttatagcttgccctttaaacatgagcatgatatctagagtaatagtggagtgatactagttgctttcagagctgagtatcaatttgtttagatgctgcaagacatcctgaaaaatttggcaatttcaaatggaaatatgaaataaagcttttttgtatatttaaatgaactgtcaagatagtttactttgaagatttgagtttcaaaaatgtattatctaaatcatgcattttcttagttttttttttttttttttttttttttttttgagacagagtctcgctctattgcccaggctggagtgcagtgttgcaatcttggctcactgcaagttccgcctcccaggttcacgccattctcctgcctcagcctcctgagtagctgtgactacaggcgcctgccactgcacctggctaatttttttttgtattttttagtagagacggggtttcatggtgttagccaggatggtctcgatctcctgaccttgtgatccgcccatctcggcctcccaaagtgctgggattacaggcgtgagccaccgcacctggccctcttagtttcttataattctttataatggactgcttataccagagctcctattttatctcaaagtttgattattttgttcacgttgttctttagatgctattaaactacagctggttgaagcaggcctagtagagtgtctactagagattgttcagcaaaaagtggatagtgacaaagaagatgatattactgagctcaaaactggttcagatctcatggttttattacttcttggaggtgagttgtaatttatgccagccaaagaatgtggttgtcagatgtttttaaaatttattgtctcttctgtaaatactaccctagacattttctcatattcctatctcacctgctattgaggtgatgattttgacatcttaaacatgccattgatacaaccagacataatgaacctgaaaaagaagtgtcttcactatcttccagtatttgaagagctgtcacatagaagagatagctttggcaccaagggactaaagaaaagctagatggctccctgggacttggactagaaaaaatgctagactctattgtctagtatctattaaatgtttattataaaaagaatcattacttttcccattatgaatgtaacagtttgtgaggtgtgagtttccagttggatattcacctaagaatgtgaatttgttactcctagttatttttctcttgcttaactattcgtttcatttacctccagatgaatccatgcagaagttatttgaaggaggaaaaggtagtgtatttcaaagggtactctcttggatcccatcaaataaccaccagctacagcttgctggagcattggcaattgcaaattttgccagaaatggtaagcatattagttcctcctttgttagtcaaatactctatatttgtttatttttgctttgctaccacatatactaaaactggaacagtttagaagttgtgtaatatgtgtatatgctgctaacttaatttttcagaaatctgaaatacttagtgacattcctaacaaattacatattttatgcaattcaactaaattctaatagtttaaatatcatgaagtgcttcttttgaatacttggcacttcagagcttagtaagtttgaatcccattctagtatacatctgctttcttttgcctagtgattttattttggatctaattatctgagtattcattctaggattattgtgcctcaacttatatacttttatgcccataaaacttaagtatgaataatcccctggcatcgtgtagaatgtttaatttagtttaataatgtttcagggggcgccagacttctatgtttatgaaatctggcactaccaaaaaactcaaatacagtctagaaactcattcttacgttcctcatgaaatataccgtgtctaggaaatacagtttatttttctttttagtttaatcatcttccagtacaaactgttggtatatattatatcataatggcttacttgctccatttttactccttctttttgggagtgacttcctaattatggaggtaagagtggcataatatggataattattgaaactagatatggggtaaatagtggttcattataatattctctccgctttgtaagtgtttgaaaaataatttaggtatcagccatgatagcaaaaggtagagtactatcactgtaacattgggagaacacaagcatacatcacaataaatgaaaaatattggacattctaaccatgtgtttctacttctgatatattatctggctctaaactaaagatttttctggtaattttctgattttaaaacttttatctagtttaagaattttttttaacacttctcactcagtaaacagaaaaacctataaatctgatgggagaaagatttggaattcattttattgtatagctccattttccctaatgtagataatagccagacatcagtattataaagtatttatagatattttaaagaggaagaaaaagatgtgtgttttttttttcagatgcaaattgtattcatatggtagacaatgggattgtagaaaaacttatggatttactggacagacatgtagaagatggaaatgtaacagtacagcatgcagcactaagtgccctcagaaacctggccattccaggtaagacttaagaatagaaggcagctgtgtacaaaataaaatccatcatttggggaagctattaactgtatgtgatttgtgaacctgctctgatgaagaaaatttaaaaaaaaatagtcttcacattgttcacattttttcatgctaataaatggagatcatatgttaaataagttttgtgagactgtacaagaataatctttgccttcattcagatatcctgttaccttttgcgaactgttagattttcatcatgttttatagttaagcttttttaagtttgagatggggtctcactctgtcagccaggctagagtgcagtgacgcagtcctggctcaccacagcctctaccttctgagctcaagttatcctcccacctcagcctcctgaggaacagggactacaggcatgtgccaccatgcccagctgattttttttttttgtagaaacaggatctcactatgttgcctaggctggtcttgaactcctgggctcaagcagtccacccacctttgcctcctaaagtgctgggattacaggtgagagctactgcaccaggccttaggcatctttagttgaggtagaataatgacatcaattaacagagtccactcaagaatgactttcagttgttgtttttctataagcagatgtacaatttttttaaaatagccttaatgtgcctttggaagtcatgaaatcactgtattatggaaaatacaacaaaagatagttaaaactattcttttatcctactttctaaaaataaatttctgattagatgaaatagtacaattacatgatgatccaatccatttgaattcatttggtttacataggatagtaacatttattaatgtctataacatttatattaacacagttggatcaaaaacggaattgtgctttttgttgtaagagggtaacattttcagatttcctttacaaactatgtaagtaagtgttttggattggatctaaaaagccatgatactgtcataaaaattattatattgtctgttatccgcttatacacaaataggatacggacacacacataaacaactgaattccattcttaaaattgacaaaaaagtgacaagattgtttctaaatggaaaaataaaacatggatcttaaagatacttaataaacctgtattgaattgaatgtttatcaacaggaatgctaataccattttaaccatagtctctctttttctccagttataaataaagcaaagatgttatcagctggggtcacagaggcagttttgaaatttcttaaatctgaaatgcctcctgttcagttcaaacttctgggaacattaagaatgttaatagatgcacaaggtaaaagaaatgttttccccaacttgcatttttcatatgatagtcttaatgtgcctctagttgaaaaaggacttgtttttagcttttaggattatgtaatcataaaaaatagcaaataaaagatttaaaagttggttttggaactccatttgttaatttttatgcttgttataattatttatttatacatattatttatttatttatttatttatttatttgtttatttatttatttttgagacagagtcttgttctgtcacccaggctggagtgcagtggtgcgacctcagctcaccgcaacttccgcctcctgggttcaagcaattttcctgcctcagcctcctgagtagctaggattacaggcatgctccacaactcctggctaattgttttggaatttcactagacatggggcttgttgctcaggctgctcttgaactcctggcctcaagcgatccacccacttcagcctcccaaagtgctgggattacaggtgtgagccaccatgtccagcctataattgactttaaatagaaattataccatatctctccttattagtacttatagtcctggttttaggttgctttattcatcagtttcggcagggggtgttgtgttttggcattctatacccatttttaccttggctttgaaatcaaatttcattattgtgacagtcaaaaattttttaaatttgtcttccagacagggagagcatttttctgtttgcagaaacagcagtcagaaccactcctaggaatgaattatgtttatttacttatttctaaattttaaacccttttctatattgattgcatagagtctttctaagaaccctgcattatagtccgccagagcactaacagactagcaggcttaaccaaaagagtatgaagtcatttgttgttgtattttctataaaatttcacagtgttacagaagaaggcaaatagcccatcacataaggaatatttgcagttctagctttaatgaaattgtcgtgctgtgtttttttagacgtccttcacactctcaaatctgtacgaattatttcaactgattgtctgttagtgattcattccttggtttgccttctttcctatagcagaagctgctgaacaattgggaaagaatgttaagttagtggagcgtttggtggaatggtgtgaagccaaagatcatgctggtgtgatgggggagtcaaacagactgctgtctgcccttatacgacacagtaaatcaaaagtaagttccagaggaaactgttcactagaaaacttcagagtgtctttttcagaaacccagcattgtaggtcctaacaactgggataatatttacctgaaagtattgtgaagattcagtgagatcatgtatataatgtgcttagctgatacatgggatataggaaacactcggtaaatgggggttgctgttgttgctgctgctattgttgttattacttttaccaccaccgttatcagcatcagtgtcaaacattctttgtgccaggcattgaccatgcagcctactgatatttagaaattaaatggtacctagatagtatatgatgtccagagctcacagagttagaaaaaaatccattcttgtggctggctgtgccgctgtctggcacatggtagataaccaataaatgaacaaatgagctattttaaagatcacaatagtgagtacccaggccagcagttcagcagctgatttagtatctagattatatgatttttaaattttttaaatactgttttcttgttgggcgtggtggctgacacctgtaatcccagcactttgggagactgaggtgggcagatcatgaggtcaggagatcaagaccatcctggataacatagtgaaaccccgggtctactaaaaatacaaaaaaaaattagctgggcgtggtggcgggcacctgtagtcccagctactcgggaggctgaggcaggagaatggcgtgaacccgggaggcggagcttgcagagagccgagattgcaccactgcactccagcctgggtgacagagcaagactccgtctcaaaataaaataaaatactgttttctttttcttttttgagactgagtcttgctctctcgctcaggctggagtacagtggcacaatctcagctcattgcaacctccacctcctgggttcaagcaattctcctgcctcagcctccagagtagctgggattacaggcaggcgccaccacactcggctaatttttgtatttttagtagagatggggtttcaccatgttggccaggctggcctcaaactcctgacctcatgatcctcccaccttggcctcccaaagtgctgggattacaggcatgagccaccatgcccagcctttaatactgttttctaaggtgaccctttcagtcatttctcttgtacaacttcagtagtgattatatatgaggagaaagtttagaactcaaatccaccagctgttttcatttatttttagaacagataagaagaagatgccaagagaaaaaacgtaaaactaaagctgttcttgtataaatctctttcatataaataattggcttcaccataatagctgtcccagctggtaagcctcaggagtgttcttctccatcagatgctaaatcttgagaactttccctggggaaaagcagctgttaactaggaccttcctattacctgtctcacccagaccaccctaaaagctcatacatttttcctgacacaggaccaagcagtatgttggcaaggtggaagttgtcaggagagaatagcaaaatggcttccttggtacccctttgaccccttctccatcataactgctctctcacgcccatttgttcatttaacagttaatatttgagttcttgcagtgtaaatactaaaaaatagtgtttctataaaggaattaactatccgttgaggggacagaaataaaaacagctagcttaagtacagctttaaagctacgtatgctattcgggtgtaacagaggaaagaaagactaacacactgtctgggtaatctgggatggtgccatagaaggagtgctattttaggcgttaactaggaatctcaggaggaaagggaaagagaatgaaggaaagggccttttcaggcaaagacagcaggatgtacaaaagcacagagatgtaaaacagcataattttttaaagaaactgcaaataaagcagtattgctagaacacagagtgtagaaagagacagtagccagagaggttgaaaactgggaattaagtgaattatataccaagttaagatatatggacttgattctgtagagaattcgggagcacttaaagggttttaagcagcaagttgccattatttgagggtttttttgttttctttattttttgtttttttgttttttcggggtttttttgagacagagtttcgctcttgttgcccgggctggaatgcaatggtgcgatctccactcactgtaacctccgcctcccgggatcaagtgattctcctgcctcagcctcctgagtagctaggatcacaggcgtgcaccaccatgcccggctaattttgtatttttagtagagacggggtttctccattttggtcaggctggtctcaaactgccgacctcaggtgatccgcctacctcggcctcccaaagtgttgggattacaagcgtgagccaccacacccagccatttagttttcatttagaaagatgtctctagggtttaatgggggtagaaaggacagttattgcaaaaatatatatgagagttgataaaggactgaattaaggttttgagttgagcaatttgaaattgctgatattcagccatttttgaaacaaatttcatatgggttattcaactagaagcagcgaggatggaaaagaagagacagacctgagaaaaatatgggtggtagaattgacagattcaacagtagaattaaaggaggaggtagttttagagctaattccaagtttggggtttaccaccagattgggttatcatgccattcaacaaaataaaacactataggaagaggtgcagctaacactccctaaacttgcccactcgcccatgctctttggagtcattacccttaatctttttgctctactccaagagaatctccaccattggtttgcaggggtatacaatcatttggatttccctgggccatattggaaaacgaattgtcttgggccacacataaaatgcactaacactaacaatagctgatgagcttaaaaaaacaaaaatcacaaaaaaaactcaaacacctgtggcatttgaagaagaagagaaatctaaaagtttagaaaaccagctgagtgcggtggctcacgcctgtaatcccagtactttgggaggccaaggtaggtggatcattgtggtcaggagttccagaccagcctggccaacatggtgaaaccccatctctactaaaaatgcaaaaattagccaggcatggtggcgtgcgcctgtaatcccagctactggggaggctgaggcaggagaattgcttgaacctgggaagcggaggttgcagtgagccaagatcgtgccactgcactccatcctgggtgacagagcaagactcccaagactctgtctccaaaaaaaaaaaaaaaacaaagaaaacttttggaaaacatatttgggagaataatcaaggaagacttctccagtcttgctagagacctagacgtccaaatacaagaagctcaaagaatacctgggaaattcattgcaaaaagatcattgcctaggcatattgtcatcaggttatctaaagttaagacaaaggaaagaatcttcagagctgtgaagcaaaagcacgaggtaacctataaaggaaaacctatcaacttaacagtggatttctcagcagaacccctacaagctagaaaggattggggccctatcttcagtctccttaaagaaagcaattatcagccaagaattctgtatccagtgaaactaagcttcataaatgaaggaaagatacagtgtgtttcagacaaacaaatactgagagaattcaccactaccaagccagcactacaagagctgccaaaaggagccctaaatcttaaatcctggaaacacatcaaaacagaacctctttaaagaataaatctcacaggacctacaaaacaaaaatacaattaaaaaaaaagtggggggtatacaggcaacagatagcatgatgaatggaatagtacctcacatctcaatactaagattgaatgtaaatggcctaaatgttccactaaaagatacagaattgcagaatagataagaattcattaactatctgctgcctttaagagacttacccaacacataaggactcacttaaggtagaggggtggaaaaagacattctatgtaaatggataccaaaagtcagcaggaatagctatcttgtatcaggcaaaacaaactttaaagaaacagcagttcaaaaagacagagggacattatataatgataaaaggccttgtccaacaggaaaatatcacaatcctgaatatatatgcaccaaacactggagcttccaaatttataaaacaattgccaatagacctaagaaacaagatagacagtaacacaatagtgggagacttcaatactccactgacagcattaaagaggttatcaagacagaaagtcaacaaagaaacaatggatttaaactataccctagaacaaatggacttaacagatatttacagaacattctacccaaaactgcaaaatatacattctattcattagcaaatggaacttttctccaagatagaccatataatagaccacaaaacaagcctcaataaattttaagaaaattgaaattatggcaagtactctctcaaaccacagtggaataaaactggaaatcaactccaaaaggaaccttcaaagccatgcaaatacatggaaattaaataacctgctcctgaatgatcactgggtcaataacaaaatcaagatgggaatttaaaaattctttgaactgaacaataaatgatacaacctatcaatacctctgggatacaacaaaggcgttgctaagaggaaagtttatagcctgaaataggcatttcaaaaagtctgaaagagcacaaagagacaatctaaggtcacatttcaaggaactagagaaacaagaacaaaccaaacccatacccagcagaagaaaggaaataaccaagatcagagcagaactaaatgaaattgaaacaaaaaagacaatacaaaagataaatgaaacaaaaagctgattatttgagaagatgaataagattgatagaccataaccaagaaaagaagagagaaaattcaaataagctcacttagaaaagaaatgggaaatactacaactgacaccacagaaatacaaaaggtcattcacagctactatgaacacctttacatgcaaaaactagaaaacctagaggagatggataaattcctggaaaaatacaaccttgctagcttaaatcaggaagaattatttagataccctgaacagaccaataacaagcaaccagattgaaatggtaatttaaaaattaccaacaaaaaaaagtccaggaccagacagattcacagctgaattccaccagacattcaaagaataattggtaccaatcctattgacactattccaaaagatagagaaagagggaatcctccccaaatcattctgtgaagccaatatcaccctaataccaaaaccaggaaaggacataacaaaaaaagaaaactacagaccaaaatccctgatgaacatagatacaaaaatccttaacaaaatactagctaaccaaatccaacaacatatcaagaagataactcaccatgatcaaatgggtttcataccagggatgcagggatggtttaacatacccaagtcaataaatgtgacacaccacataaacagaattaaaacaaaaatcacatgatcatctcaatagatgcagaaaaagcattccacaaagtccagcatctctttataattaaaactcagcaaaattaacataccagtgacatacctcaatataataaaagccgtctatgagaaactcatatccaacataatactgaatgggaaaaagttgaaagcattccctctgagaactggaacaagataaggatgcccactctcaccacttctgttcaacaggactggaagtcctagccagagcaatcagacaagagaaagaaataaaggtcatccacatcggtaaagaggaagttaaactgttgctatttgctgatgatatgactgtatacctagaaaaccctaaagactcctccaaaaagctcctagaactgataaaagaattcagcaaagtttccagatacaaaattaatgtacacaaattagctctcctatcaccaagagcaactaagctgagaatccaatcaagaactcaacccttttacaatagctgcaaaaaataaaataaaataaaatacttaggaatattcctaaccatggagatgtagttttacaaggaaaactacaaaacactgctaaagaaaatcatagatgacacaaatgaaaacacatccaatgctcaccgatgggtagaatcaatattgtgaaaatgaccatactgccaaaagcaatctacaaattcgatgtaggtcccattaaaataccaccatcattcttcacagaactagaaaaaacaattctaaaattcatatggaaccaagaaagagcctgcatagccaaggcaagactaaacaaaacaaatctggaggcatcacattacctgatttcaaagtatactataaggccacagtcatcaaaacaacatggtagtggtacaaaaataggcacacagaccaattgaacagaatagagaaccgagtaataaccccaaatacttacagccaactgatctttgacaaagcaaacaaaaacaaaatggggaaagggcaccatattcaacaaatggtgctgtgattattggcatggaagaataaaactgttgcctcatttccaacttaatacaaaaaaaaaatcaacttgagatggatcaaggacttaaatctaagacctgaaactaaaaattctagaagataatatcagaaaaagccccttctagatgttggcttaggcaaggatttcatgatcaagaacccaaagcaaatgcaataaaaacaaaggtaaatagctgggacttaattaaactaaagagcttttgcatggcaaaaggaacagtcggcagagtaaacagacaacccacagagtggaagaaaatcttcacaatctatacatctgacagaggactaatatccagaatctacaataaactcaaacaaactagcaagaaaaaaactaataatcccatcagaaaataggctaagcacatgaatagacagtaatgaagatatacaaatggccaacttatgaaaaaatgctcagcatcactaatgatcagggaaatgcacatcaaaaccacaatgccataacaccttacccatgcaagaatgtccataatcaaataaaaaaataatagatgttggcatggatgcagtgaatagggaatacttctacactgctggtgggaatgtaaactaatacaaccactatggaaaacagtgtggagattccttgaagaactaaaagtagatttaccatttgatccagcaatcccactactgggtatctgcccagtagaaaagaagtcattatacaaaaaatatacttgcacacatgtttatagcagcacaattcacaattggaaaaatgtggaaccaacccaatgcccatcagttaacgagtgaataaagaaactatggggccaggcatggtggctcacgcctgtaatcccaacactatgggaggacgaggcaggcagatcaccaagtcaggagatcaagaccatcctggctaacatggtgaaacctcgtctctactaaaaatacaaaaaattagccaggcatggtggcgggcgcctgtagtcccagctacgctggaggcttaggcaggaggatggcgtgaacccgggaggtggagcttgcagtgagccgagatggcaccactgcactccagcctgggtaacagtgcaagacgtgtctcaaaaaaaaaaaaaaaaagaaaagaaactatgatgtgtatatatatatatgatggaatgctactcagccataaaaaggaatgaattaatggcattcgcagcaacctggatgagattggagactattattctgactcaggggtggaaacccaaacatcatatgttcttacttataagtaggagctaagctatcaggatgcaaagacataagaatgacacaacagactttggggacttaggggtaaagggtgggaagggggtgagggataaaagactacaaatatggtgcagtgtatactgctcgggtgatgggtccaccaaaatctcacaaatcaccactaaagaacttacttatgtaaccaaacaccacctgttccccagtaacctatggaaataattttttttaatcacaaaagaatttcataatgttttaagaaagctacgaatttgtgttgggccacgttcaaaatcatcctgggctgcaggttggacacgcttggtttagagttttggcaaaccataattgtattaactaatttacagacatgatcctggcatctgaatttggaactctcagataaattcctgttacatgtagtagtaaggctcgtggaaaccttgattaatctagtatcttcagtatcaactaacagaattacataaccaaaccattcatggacacaaaaatatgtccacaggaagatacatcccagcttcttagaaacatctgaatttaggagccagaactacttaaatgctataatatttaataaatttaaagattttgaggcttttctgtgaattttgttcatagatccccctttccctcatctaacctcccacttctcgcccatccccgaaaagaagagttcaaatacccatcaccacgcaggttctttgaatgatgagaactgtggcatggtacccttttaggaaaaggtggatgggggtgtgtgtagcagaaaacaacttgaaattatataggattgtaactttatagttacatattacaactttaggattacaattcaatacctttacatatctttcctacaattgagagtatactgctgctaagcagccaaggagccttgattctcacactttaatgagcagaactataaagtgtgttaattgcatgagttctatgtcagagctgttattttctaacttaaccagtgttacagtagacatgactgcttttgagcagcagttcaagtttgtttcatcaaattataatcccaagaaatcttctacaaagaaagagttgcataggtagattagttatgcaaatagtaattatttttttctttgcctttgagattcacagcacacattaatactaaagaaacctctttaattttatttgaatccactgattgccaaactgtttgaccatggatcctttctgcaggtggcatctgttattacactggacgtactttggaaaaatgctgttctagaataagtttttaaaataattaaacaccaggttcaaatgtattacattcctgtagatccttagccagctgtgtgaatcacagctctctccttgtgttgttcttaaactttgaagatcatacctcaccctgaattccgtcttggagttcaacccttcaaaagtttgcactgactcacaaggtttcatgctgcttagtcatctcagcactttgcagtgtattcctgtgctgatgctcttaggtaaagtcacacctttctttgaaagagtgccctagtctaggactgctgaccaactagctgaatcttccaattatagacatcaaaaatgtaaagagaaatataggttgcctttataccaggaatataaaaactccctgctatcaaagccagcacttttctttaacctttaagagtagagaattctttatcagttaccaggctaaaaacttgtttaaacaaatgtatttagtcatttgctcattcatccaacaaacatttatttaaatcccgtactgaaaaggctttgatgatacaatcttgaaaaagaaaatttttgttaagtggctcaccaactcaatggctataccaaccggcaatcttataaaattacctcaaatcaaagcctatctgaaaatattccgttgtgatcaacatgatacagttttcaacagtcttaacctgggttgatttcactaatcaagggcaaattgactaaatgctaaatagatgaaattgttagcatggataatttgccttggttttatatataccaaaatttagctttctataagaatagaactatgaaataaaacatgtttcagactgcataaagcatctccagaatttttaagaacaaagacccactaatcagccaaactgcctaggttttagccttggctttaccacttatttattgtctgaacttgggcaaatgacttcatctgagcttcagttccttcatctatatgaacaggagatgatatctagctaatgagattttctgcaggataaaaatttgctaatatctataagctactcagtacaatgtccagcttatagttattgctccataaagggttgccatcaatattattctgtcacatgtgacgaatacgatgttttatctattttttaatcccatattctataaggcaaaatgatttcatagaatagctattcaataaacatttgttgaagtagttggtgagagggcaggaatttttttttttaattatactttaagttctagggtacatgtgcacaacgtgcagatttgttacataggtatacatgtgccgtgttggtgtgctgcacccattaactcatcatttacattaggtatttctcctaatgctatccctccccgctccccccatcccacgacaggccccagtgtgtgatgttccccagagggcagaaattttaaaaaggactcaggtatctgttccggaaaagtgagatgaaagtatacctggccaaagagaggacactgttcatttctgatgtacacatttccttagttcattccctactcttccttctactacactggtcttttaagtgtgattagaaacatagaggacaaaatgacagttcaaacatcttccctaaatgattgcatatgtatctgttcatctcttatggtcttctttactcaagctcttttgtgatttttataaaattttttactaagaattctgtgtctgtttcaaataaactgttgctgagtaaacagtaaattggggaggttagaaaaagctttctaaaacagattgatggggaaaaatgtattagatgccagaacacagctaccataaaaacttagttcttggactctatttagcaagtttgatcactaaacaagtttgggctcaaagcaaagatactttctaaaaatagttttctcaaaaaatttttatgaaatggaagcataaagcaaaccctttaaaaatattttagcaaatttggaaaatatttccaactacaattaattttgaagctgactcaggctttttaaaatgtccagaccttcaaattattaaaaatattgaaaatagagaaaattatttttaaaatattattgagacctcctactaaatcagatttagttcaagagttctaagacaacggaacccttggtggaatgaagaccaaaaagggtactagaaataaaggtgaacattttttttttcatctaacttttgccagatggtcttatatgttttctgtgtaataactttgtaataacaaaaacctatgagatatatacttacatcattccagtgacatggagatagtactgaggtaagagaggttcagtaatttgctcagtcagtgggatttattgaatccagagcttgatgtctcctctgtcatggagagaagacagagctctaagcaccatgagaaatgagggcagatggagaattttaagttctgctcagtctttttgcatgtaattcagttttcatatttgtaagattaaatcaaggggtaaaaagtacttaaaattttttcataaaagctttacctggaacatctgcagaacaactacctggcactatcatgaaaatttaaaagcaacttttttttttttaagaggcaggttctcactctgtcacccaggctggagtgcagtggtgtgatcatagttcactgcagccttgagctccctggctcaagcagtctcccacctcagcaccctgagtagctgggactgcagatgtgtgccaccatgactggctaatttttttattttttgtagagatggggtctcgctatgttgccaggctggtctcaagcgatcctcctgttttggcctgtcagagcactgggattaacgtcctgagccaccgtgcccagctgagaacttttttaaattccaagttttattcttgtttgtcaatcctaaggtaggtcaacatttaaggcagtgacatttttacttctttggctttggtagcttctaagccttctgttttttaatatgaactgcagtggtcttttctacttaggcaatttaagttgtcatcttttgatgaatgtatttaaagctaaaagctttttccttttcttctgtggagaaaaaaactatgattaaatcaaatgattcatacaggacactgtcgcaaaaccactcaacaatgagttgactgattttaatgcatgttccttatgtttaaaattaaagtctataattctctgatattatttattgtaggatgtaattaaaaccattgtgcagagtggtggcatcaagcatctagttaccatggcaactagtgaacatgtaataatgcagaatgaagctcttgttgctttggcattaatagcagctttagaattgggtaagtaccccagtgacaaacttattttcttctatttttatcttggatgaaaggaagtatagaagtggagttgaagtcagacagaaccttgactggaagcattttgctagtgtctgtaccgttctctgaatctatggaaaatcattctatatagattgttacagctgtcccctttggctgtgtttttggtaacatttttagggcaatgcattaaggtaagtttaacttttaaataatgtctcaagttacagccacttagagaatagagaaaacgttttcagcaggcttcacagagaaaccaaacaatatttagaatatgacagcatatgaagagtctgctactctcccagtgacccatactttctcttccatctctgctggttctctctactaccgattctttcttgctgttctccttctccatcaccgtgacttctattgccttactctaatgtcttgtcttctgtgttacccttctgtgtgttttgcattcagaactcccccaaagcagaggctaaataggctaaataatttcattagtttcagtttaacatagcttttttttttttttttttgaaacagtcttgctttgtcacccaggaggctagagtgcagtggcgcaatctcagctcactgcaacgtccgcgtcctgggttcaagcaattctcgtgcctcagcctcctgagtagctgggattacaggtgcatgccactgtgcctgactaatttttgtatgttttgtagagacagggtttcaccatgttggtcaggctggtcttgaactcctgacctcaagtgatccacccacctcagccctcccaaagcgctgggattacaggcgtgatccaccatgcccggccctaatatagcatttctgttgggcagaattcatcacgagaagctaatccgtagacatctagtttatgaatagcataagctggatggctttggagccaacccaagacagtcagccagggatggtgtaatagagtcacgtggcctgtggttaaggcctaaggctgcttaacacaaaggaggactttacacttagtagggatgtcctatccaattcaaagccatttgggtaaatactgttaactgatagcctcttaattcccactgacaacttagatccataattctcacactggggcgaatggaccctccaaccccagttccaggaagaggaaacactcatgtgagtatttttttatgtgcatagtgtgtaatgatcaagtcaaggtgtataggatatctgtctccttgaatggtctgttggtgactggaagccttaccaataacagtcagtgaacatatattttgtatatgaattatatactatattcttataataaagccagagaaaagaaaatgttaagaaaattgtagggaagagaaaatatatttactatttattaagtagaagtggattatcaagaaggtcttgaatccttgtcttcacactgagtaggctgaggaaggggaagaacagaaggggcttaggcttgctctctcagggatggcagaagagaagaaaatccaggtataattggacccacacagttcaaacttacgttgttcaagggtcaactgtatattctttggtgaaatgctgatttttgtcttttaaccattttttttttgactgttgagttttgagagttctttatatattctaaaaattttgtagttctatattttacatttaagtctgtaatccattttgagttaatatcggtataagtcacgcctgtaatcccagcactttgggaggccgaggcgggtggatcatgaggtcaggagatcgagaccatcctggctaacacagtgaaaccccgtctctactaaaaatacaaaaaattagccgggagcggtggcgggctcctgtagtcccagctacttgagaggctgaggcaggagaatggcgtgaacccaggaggcggagcttgcagtgagccgagatcgcgccactgcactccagcctgggcgacagagccagacgctgtctcaaaaaaaaaatatatatatatatatatatcggtataaggtacgaggtttaggttagggttcattttctttgtcccatggatgtctaattgtactagcacctttcgttgaaaagctgtctttcctccactgcactgattttgtaccattgtcaaaagtcagttgagcatatatgtgtgagtctatttctgggtcttccattcagtgcctttgacataagtgcctatgttgccaccagtaatatgctatcttgattactgtagctatagagtaagccttaatactggatggaggaattcctcacactttattcttctttatcaagatggttttagctattttagggcctgtggctttccatgtaagttttagtataagcttgtatattttctacagaaaatcttgctaggattttgattgaaattccactgagtccttatcttttatttgtggagggaattatgtgatttataggatttgctccaaaataatttgagatggatgacagcaggtgaatgagagagatcggccataattctttaaggtgataagtgcataaggtatattattataccatcttttctgattttgcatatgtttaacattttccataataaaaagtttaattgtctcatattaaaagaaatgtgttagtattaaatagtaagcttaaacacctgaagtgtctactaaaatctaattctatttactcttttcacatggtctgaatttaatattatttttctaggtcattattatttatcagttccatttagaaggtttcgtatggtcaatttcttcaaaatgaagcagtgtttatcctgaggatactgggttcgtacgcagtagatatactttgttttatttgtaggcactgctgagaaagatctagaaagtgctaaacttgtacagattttacatagactgctagcagatgagagaagtgctcctgaaatcaaatataattccatggtcctgatatgtgctcttatgggatctggtaagtattcttctatcatttgatgtccataaacatatggttcacattaaatattaaatatagagtaatagtaaatgatggttttgggttttaaagccgttagaaattagtttatggaggttataagataacttttttcccctattactgtaaacactcatttcttcatggtgatgacattgaaaatcttctcttctagctgtcttgaaatatacactacattggtattttctagccatccaactgtataatagatagaattacttttcactgaagacattcccaaaagattctcactacaatagaaagtatcatatagcaaatctagacaacattcagtattgcaaaatcagtaagtctcatgaaccctaaaatgttattttatagcaggcacaggttctgattttgtatgccataatattaactaaggaatttgtttaggaggccaggcacggtggctcatgcctgtactcccagcactttgggaggctgaggtggtggatcacttgaggccaggagttcgagaccagcctggcgaacatggtgaaaccctgtctctactaaaaacacaaaaattagccgggagtggtggcacacgcctgtagtcccagctactcagaaggctgaggcaagacaatcgcttgaacctggaaggcagaggttgtagctgagagattgtgccactgtacttccagactaggcaacagaacaagactctgtctcaaaaaaaaaaaaaaaattttttttttcaacaaatcattggtatatcttctatggacattggcatatcttggtatatgttctatggacacctgaaaagagtgtgtattatgcagttattgggtactgttgtataaatgtgaatttgattctgttggtactagtgtcaagtttcctttattcttgctggttttgcagttaattgttctgtcaattgtcgagaggaagggtgttgaagtctcccactgtagatttacctatttctcctttcagttctgtcaatttttgcttaacataattttcagctctgttgttaggtacctacacctttaggattgctgtgctttcttaagggattgacccttttatcattatatagtgtacctctctctggtatttttctttgctctcgtcaactttatctgactttaacatagctacttctgcttgtttttttattattactattttattttctttcatgtgccactacaagaagccatcctactttcttttgaataacattcacatgatcttttctcactcttttagtttcaatctgctgtatttgaagtgagtttcctgtatacagcacaaagttgtcattttctaatctactctaccagtcccttttgtgtatttagaccatttacatttaatggatgactgatatggcttaagtgtgcaatcttatttttgttttctgtttgtcacatttcttctttatttctgacttcctatgggttaaacattttttaatcatttacatttattcttccatatatatatatatatatatatcttttttttttttttttttttgagacagagtcttactctgtcacccaggctggagtgcagtggcgtgattttggcacactgcaacttcttcctccagggttcaagtgattctcatgcctcagcctcccgagtagctgggattacagatgcctgccacatcacacctggctaatttttgtatttttagtacaggcggggtttcactatgttgcccaggctgatactgaactcctgaccacccgtcagggtgatccacctgccttggcctcccaaagtgctgggattacaggtgtgagccaccacgcccagcctctcacgtatatcattcttaaatatttcttctacatatatttagaatcacgttagacagtgttacaacttttctttcaaccaccaaacatatttcagaaaactctttgaaagagaagggaagtctatcgtatttacgcacatttttagatttcttatttttgttataatcattccctttctgtttagagaacttcctttagccatactgctagcaacagatttttagccaaaaaaaatttttttcattcataatgaaagggaaatgacattgtcaaatgacagaaaatgggtataggattctgggttcacagttcttttctttctttacttgaaaactattgtgccacttttttctagcctccctggtttctgatgagaaatccattgtgttcttatgtgttttattcccctgtaggtaaggtttcatttttgtctctcaagactttctttgcgtttagtattcagaagtttaactatgatgtgtcttggcatggatttctttgggtttatcctgtttgagtttgctcagcttcttgaattgataggtttatgtcttttgctaaatttgagaagttttgactgttacttcttcaggtacttttcagccccattctatccactctttccagacctttgttgacactaatgtgagatctttaattatagtcttgtaggtccctgaggttttgttcttttttacccacagattattttctttctgttgtacagactgagtaatttctattgttttatcttggaagttctctgattatttcccttgtcccctctattctgatgttgaacctgtttttatttcagttatatattttagttaaaaatttccatttgcttcttctttatatcttttatttccttgcagagactttgagtctcttccatttgtttaagcatttttagaattgtggtaaaacatacaaaacataaaatttactgttttaaccatttttaagtatacagtttaatggcattaaggacattcacattgctgtgcaatcatcaccagcatccatctccagaaccaccttcattttcccaaactgaaactctgtactcattaaccaataactccccatttacccctccccacagcctctggcaatcaccatttattttgtgtctccatcatctgacaactctagtcaccacatatatgtggaataagaaactcctgtccttttttgtctagcttattttacttaggtctttaaggcttatctgcattgtaggcgtgtcagaatttcatttccttttaaagctgaataattttccatcatatgtatatatcacattttgtttatccattcatcaatccatggacatttgggccatttccaccttttggcttttgtgaataatgctgctgtgaacattggtatgcaaatatctctgagcctctgcttttaattatttttgatatatactcagaagtggaattactagatcatatggtcattcaatgtttaatttttttattaaatactgtttttactaattaaatactgtcatactctttttcacagtggctggaccattgtacatttcttccagcagtacacatggattatcatttctcaacatcctcaccaatatttgctgtgttttagtaatggccaaactaatgagtgtgaggtggcatcttactgtggtttttatttgcgtttccctaatgattactgatgggaatctttttatgtgtttgtgggccatttgtatatcttctttggagaaatgtctattcaagtctttgcccatttttagaattgaagggtgttgttgttgttgttgttgaattgtaagagttttgttttttttgagacggagtttcgcacttgttgcccaggctgcagtgcaatggtgcaatctcggctcaccgtaacttccacctcccaggttcaagcgattctcctgcctcagcctcctgagtagctgggattataggcatgcaccacctgtagagatggggtttctccatgttggtcaggctggtctcaaactcccgacctcaggtgatccacccaccttggcctcccaaagtgctgggataacaggcgtgagccaccacgcctggcccaagttgtaggattttgtaccagtaccccactatcttgattattgtagctttgtagtaagttttgatatcagttagtatgagaactccagctttgttcattttcaagattgttttggagatttagggtcccttgagattccatatgaattttaggatggatttttctattactactaaaaacactggttcattggtttatgtcagtcatatcaaaataaacacatcagtttcagtagtactgattacattaagcttattagacttcactcatcccatataacagttctcagagtcctaacaggaatcctatattttcttgtaattgaagttaaatagagaaagcaagtcagaaagaagaggacaaaaaatctaaaagggagtccagtgtcacagaaatttgttgaaggatatgaagtataaacttttcttttgccacaaaattaatttgaaacatatcctaagctttttggtaagtcattggacttcatatttgaactggtgatagggttgtatgtaaccaaaccttgagatcatacagtgagctgtgtttaattataactcattattgtaattaatcttacattgtagaacttgacgtctcgtttttctttttaaaaattgggcaagtagctgtgcagtggctcatgactgtcatcccagctacttgggagactgagcaggatgaatcccttgaggctaggagtttgaggctgcagtaagctgtgaccatgccactgtactcaaacctgggcagcagagcaagtccccatctttaaaattttttcctttaatttaaaaaaaagtaaagtttttatgatttttttaaattataatacatttctaagaaagacattgctaggctactgctatgtctttttccagaattgtttctagttttataagcttagtcttgtcaaaataaacattttggtatatgttttggatagacttagaacaacctaacagaatcatatctgttatttttttgtcttccagaatgtctacacaaggaagtacaggatttggcttttctagatgtcgtatccaaacttcgcagtcatgagaacaaaagtgttgcccagcaggcctctctcacagagcagagacttactgtggaaagctgagaactgcccgatacacggcatcatcccatctctaatttcccctctgtcctccatccagcggcttcttccgcttcattctctaccataccacttgtgcatgcatgtgatgttctaataccaattgaagaaccgctgtaggtacctccctaataagatttctaaacctatagttagtgtgatcatgactttgtcaaaggcaagtctccacccataaccgttctcttgtattcctgttgcttgagctacattaagtagaatgtgcatgttgtagtcctatgatgatgtaaacttggtactacataatgacttgctccacacatgcagtaaactacataatgatgtactggtaaactagaaacaaagaatgcagcaggatctgtctagcttattaaagatgaaactgaattggaaaaatagctccattttttggtgcttgggaagcacagtgaccaaaaaagttgtatggctgcttattcattagtctttcctactgatgtcaaatccatggtacctagagttaaataaaattccaatgctcttactctttaacttctggtttctcctttttcctttttagactattgaaactgccacaaacttggcaagactttctgaggtttctgattccatatttaattgactattatcaatagcctgatattgaaaaacatttgtagttttcagtgtgaaactaaggggttgaagaatcactattacaatccctattacagagcatttcgggttttgcttgtattttagattctgatacatacgctgtttcactcaggaactacttctaccagttaatcagcattatccagcacttgtctttaaaattcatttggcgcttgtttgttttcaactgaggaaattgagtatagttcattgaagaatggaatttttttttttttttttttttttgctgtttttcatcattcagctagaaagtgagaagttttatcttccatagtccttttaaatcttatgttagaactagcaggacgtaggtggaaagatgaagaaataagcttgtctagactaaagaaaggaaagcaggttataaaagccatagtagccagtccagttcattctgcagatggccccataccaatcgctgttagagtttgccacctccactttcccactgagaactgcagcaattttaaaggatatgagaaagccaagactcaagagatgagaagacccccttggcgaaatatagtgtactcttcactgccactgccaccaccaaatgggtttttagagctttgaaacacaatctttgtaaattaatcaaaacctccctgtgacccacctgccttctccccatacccaaatttgaccactactggcctaaaaggcaagatgggcttcgatatagaaggactgcaagacagtagaaagggctgccacggaggtgacagtagctccttcctctccaacatgtgatgctacacatctctgtggataatctaagttggacttttgactctaaaacagctataatccaagaaagttaaattctaatggaggtaaagaatcttgactgattgttccctttgatgtccaaataagggaactattgtgagtacgtatgctacacttactataagaatgatactgtttgttgtctttctcctgggctggatagtggactatattttattacaggctttgaaagacatctgtaatgttgcatatctgttcatattaataacttaataaatagtatatgaagctataatggcatcatttggtttgtttgtatattttgtctctatttccagctcctagaataaggcttgctattgatgttcaacaaatatttgttgactgaatgaatgaatcctgcatccatgaagtttccagactgcctgaactaattccagaaagatagactgactgactgatagaaagtttgagatttgatagtttgtctgactttagggaaaaaattttaacaaaagcatcctaaaatcgtaaatgtgagagaagttaccatctaggccagctgccagccatcaatttgctaatatgctaggaactcccatctccagcaaaataaagtgcaattcaaagtactcatcattgtacggaaagaccagaaggctgtgcccttatcacaggggctaccaaattagatggtacactgatgtgccattgcagtggatgggagagtctacagactgtactctcgcttatctcctgctactaaatcttagtcctagaggccactatttattaagttagtttgctacccactaagagtacattctaagggagacaacaggagggaagaacagcacaacaaagctttaactgtcaatcttgagccagtactagaacatagatgaaaagggcaggaatacaagcaaagaagatgcctgagtgcaatgcactagaatatacccctttccccccaaccccattagcaacttggagtcatgccagcccacccacctagaccataacctcattgtgctcaaagcaaacactagcccataacccagtgttttccatgataaaaacatgttttgagcatactgtctgataagaatggagacatagaagaaaactttttcatctaaaatgatttcttgaatagaatgcagttctcatatgcaagcattagtctgaagtgttctgaaaaatgctacatgtgaagaattcaaaaagaaatgctctttgttataattaggaggcttattatctaattctcttgaacatactgggtgaggatatct

SEQ ID NO: 80 - RNA, 3767 nt, Homo sapiens
  source 1..3767: mol_type = mRNA
cccccgccgctcgtccccgccgcggccgcgccgcctgcagcagcaccagctgctcctccccggcggccgccccccgcgggtccctccctggctgcgggagagacggaggtagagggaggacacagagccgcgccgcccgcaccacagaccttcgcctcgccccgccggttcctcaccctcggggagcaacatggcagataatctcagtgataccttgaagaagctgaagataacagctgttgacaagactgaggatagtttagaaggatgcttggattgtctgcttcaagccctggctcaaaataatacggaaacaagtgaaaaaatccaagcaagtggaatacttcagctgtttgcaagtctgttgactccacagtcttcctgcaaagccaaagtagctaacatcatagcagaagtagccaaaaatgagtttatgcgaattccatgtgtggatgctggattgatttcaccactggtgcagctgctaaatagcaaagaccaggaagtgctgcttcaaacgggcagggctctaggaaacatatgttacgatagccatgagggcagaagtgcagttgaccaagcaggtggtgcacagattgtaattgaccatttaaggtcactgtgcagtataacagatcccgccaatgagaagctcttgactgtcttttgtggcatgctgatgaactatagcaatgagaatgattcgcttcaagctcagcttatcaatatgggtgttattcctaccttagtgaaattactgggcatccactgccaaaatgcagctcttacagaaatgtgtcttgttgcatttggtaatttagcagaacttgagtcaagtaaagaacagtttgccagtacaaacattgctgaagagctagtaaaactcttcaagaaacaaatagaacatgataagagagaaatgatttttgaagttcttgctccattggcagaaaatgatgctattaaactacagctggttgaagcaggcctagtagagtgtctactagagattgttcagcaaaaagtggatagtgacaaagaagatgatattactgagctcaaaactggttcagatctcatggttttattacttcttggagatgaatccatgcagaagttatttgaaggaggaaaaggtagtgtatttcaaagggtactctcttggatcccatcaaataaccaccagctacagcttgctggagcattggcaattgcaaattttgccagaaatgatgcaaattgtattcatatggtagacaatgggattgtagaaaaacttatggatttactggacagacatgtagaagatggaaatgtaacagtacagcatgcagcactaagtgccctcagaaacctggccattccagttataaataaagcaaagatgttatcagctggggtcacagaggcagttttgaaatttcttaaatctgaaatgcctcctgttcagttcaaacttctgggaacattaagaatgttaatagatgcacaagaagctgctgaacaattgggaaagaatgttaagttagtggagcgtttggtggaatggtgtgaagccaaagatcatgctggtgtgatgggggagtcaaacagactgctgtctgcccttatacgacacagtaaatcaaaagatgtaattaaaaccattgtgcagagtggtggcatcaagcatctagttaccatggcaactagtgaacatgtaataatgcagaatgaagctcttgttgctttggcattaatagcagctttagaattgggcactgctgagaaagatctagaaagtgctaaacttgtacagattttacatagactgctagcagatgagagaagtgctcctgaaatcaaatataattccatggtcctgatatgtgctcttatgggatctgaatgtctacacaaggaagtacaggatttggcttttctagatgtcgtatccaaacttcgcagtcatgagaacaaaagtgttgcccagcaggcctctctcacagagcagagacttactgtggaaagctgagaactgcccgatacacggcatcatcccatctctaatttcccctctgtcctccatccagcggcttcttccgcttcattctctaccataccacttgtgcatgcatgtgatgttctaataccaattgaagaaccgctgtaggtacctccctaataagatttctaaacctatagttagtgtgatcatgactttgtcaaaggcaagtctccacccataaccgttctcttgtattcctgttgcttgagctacattaagtagaatgtgcatgttgtagtcctatgatgatgtaaacttggtactacataatgacttgctccacacatgcagtaaactacataatgatgtactggtaaactagaaacaaagaatgcagcaggatctgtctagcttattaaagatgaaactgaattggaaaaatagctccattttttggtgcttgggaagcacagtgaccaaaaaagttgtatggctgcttattcattagtctttcctactgatgtcaaatccatggtacctagagttaaataaaattccaatgctcttactctttaacttctggtttctcctttttcctttttagactattgaaactgccacaaacttggcaagactttctgaggtttctgattccatatttaattgactattatcaatagcctgatattgaaaaacatttgtagttttcagtgtgaaactaaggggttgaagaatcactattacaatccctattacagagcatttcgggttttgcttgtattttagattctgatacatacgctgtttcactcaggaactacttctaccagttaatcagcattatccagcacttgtctttaaaattcatttggcgcttgtttgttttcaactgaggaaattgagtatagttcattgaagaatggaatttttttttttttttttttttttgctgtttttcatcattcagctagaaagtgagaagttttatcttccatagtccttttaaatcttatgttagaactagcaggacgtaggtggaaagatgaagaaataagcttgtctagactaaagaaaggaaagcaggttataaaagccatagtagccagtccagttcattctgcagatggccccataccaatcgctgttagagtttgccacctccactttcccactgagaactgcagcaattttaaaggatatgagaaagccaagactcaagagatgagaagacccccttggcgaaatatagtgtactcttcactgccactgccaccaccaaatgggtttttagagctttgaaacacaatctttgtaaattaatcaaaacctccctgtgacccacctgccttctccccatacccaaatttgaccactactggcctaaaaggcaagatgggcttcgatatagaaggactgcaagacagtagaaagggctgccacggaggtgacagtagctccttcctctccaacatgtgatgctacacatctctgtggataatctaagttggacttttgactctaaaacagctataatccaagaaagttaaattctaatggaggtaaagaatcttgactgattgttccctttgatgtccaaataagggaactattgtgagtacgtatgctacacttactataagaatgatactgtttgttgtctttctcctgggctggatagtggactatattttattacaggctttgaaagacatctgtaatgttgcatatctgttcatattaataacttaataaatagtatatgaagctataaaaaaaaaaa

SEQ ID NO: 81 - DNA, 33115 bp, Homo sapiens
  source 1..33115: mol_type = genomic DNA
acgcacaagtctgcagctctccccaactttccgttcagctcagtctccgagggtgcgccagagcagacacccggaggagtggggagtggcagggcggggccgggagaatgctgccccggaacccataaatctgggccctgcccaggtaggccgggacagctggggtggcctgggccgagagccaagaaaagacaccccatctggcagcccaacttggcggcaacaggtggcccggcgcccgggggtctgggaggaaagtcgctccgggggcgggccccgttgccccgccgcgtccccattggtcatcaggtttcttaaaatgtgactctgaatctgtgtccttccgccgcagaatttagtcccaccgaaagggcaacctgcccgcgcgttccgccgccgccgccgcgcttcctcctgaaggtgactgcgcccgcggggacgcagggggcggggcccgggtcgcccggagccgggattgggcagagggcggggcggcggagggattgcggcggcccgcagcgggataaccttgaggctgaggcagtggctccttgcacagcagctgcacgcgccgtggctccggatctcttcgtctttgcagcgtagcccgagtcggtcagcgccggaggtgagcggtgcaggaggctacgccatcagtccccaccaagggccagtcgcccggctagtgcggaatcccggcgcgccggccggccccgggcacgcaggcagggcggcgcaggatccagggcgtctgggatgcagtggagctcagagagaggagaacggctcctcacgcctggggcctgctcttcagaagtccccagcgccgttccttccagatcaggcgggtccgccggctcctttcccgccccagccctaccccctcattctggtcccatcctcttcctcctgccccaatcctcaatgcgcctccatcctcgcctgccttctctcggtccctcgtgattgattccacccttgcttcccctttctccgcgccgcctgttccgtgctcgttttcccctcttcctccttaagtctggtccttccaccccctcctcttcaagctgtgcgtgtcccctgattctaatgctttctgtgtaactcattgaaactgcgttctggttcccctcccgcgtccattctccattcatgcgcgaccgcccttcccgcgccccagttccctctcgccgcccctccccctgcttgctggtcacgtccgctcccccgcatccccttcctcgcctggcgtgtccgctccctccctccctctctgctctggtcgcgcccgcccacttgctccggtctccgagcgcggtcccaccccccttttccatcaccgcctcccagctcccagcaggctcgggcggtgctgaggccccgtgtccggggcgggcgggcggagggctgggctgggtgccccgcgcggcgggcgggatgcggcggcccgggggcagctggagacttacgtaacgttggcctgccccgctgccgggaggcagggcggttgcccctgcggcgcggtgccgtcccctgtggccgggattagatgggcggcctgcgagggcctgggaatggctcggggcccgagagctcgaccggcccttgccgggtggccgccagggaccacgctccatctcgccgcggccgggctgcacgtagcggccgcgcccagggcccaccccgcttcaccgggcgatggccttgggcctcgtaacgggcgggataaacctctgcaggctttgctggggcctcctggccctcgcccgttccgcgcctctccggcacgtttctttcttttcctttcttttttctttcttttttttttttttaattatccggcacattttttaacaaatgcgtcctgattgtggaacgcggaggccgcggggtggggtggggatctggttacggagggggcaggaaatctgtcgcgttcactgaacgcaaacggtgtgggtcaagggctgtttgggggtcagagttagagaccaggatgactagacgagtcatagcccaccgagctcacaatcttaaaatgtatctcctgtaatgctgggagtggggtacgagcttcctgctgtgggagggagggggacaggaagcctcgtaaggtctcaccaggtggcaagcacactggattagaagatgcaggaaagcaccttccagtctgaagatcatttaaagactcagtcatgtaagggcatcccttggcttcttaatctacgtactccagacccagggcttggacctttgctggtacgggttaaagtgaggccgacagtgaaggtccacgtggagagagacattgggaagttgtcaaaaaggcgtttagaatcaggtttgactcattaatttcctgagactctgaaggagttcagcctctacacctcagtttcccctgggaaaactgggagtaacattttcctcatgatggttgaaaggattcatgcttacgtggatgtggcacactcagtaagtgtctaatctctggcgaaatacccagaagaaaagcctgtgactgaatatattatttttgagcacaattacttagtccacaattgagcataagggccttgatccattgtcttcctactgtccccaaacgcctacagctaatcgtgaggaatcaggctctctgaataaccacgtgtctcctggaaaccagttccccaagggatctggtttaatattgacaaagtaactgataatgtaactttccaactctctgcttggagcagatgctttttggtcatctgagattgggacctgtagacaaaggcaggcaaggaggggctgagttaagcctttggtgttccgctgtaagtagaatactacctaccagaggaacattccagcccttgacttgctctgcctgctggtgagattaggattggagccagggtcagtagcccccagttggccgtcttgagggtgtggccactccctaggtcacagaggagatggaggtcaggactcccctgctgcagcgttgttagcaaataatttgccctttggtggcctgaggtgctgtgggggcaggagtgggctgtcttgtggggaagggaaatgtaacgtatcaccaaatctgtgggggagtggggctctgtggggaagatgactcaacctttcaattattctgcttttgagagaattatcttcgctgggtgagtggggaaactacattgtggttcttgcaggcttaaaaagtcccttctcccctttcagtgagtcagataatgaagcatgcatttcccctaattaaaaatgcctcaactacggagcttgcagtgagccgagatcgcgccactgcactccagcctgggcgacagagcgagactccttctcaaaaaaaaaaaaaaaaaaagccacaactaattaaaaaatgattggtccgggtcacctggttctctgtactgccttaagagcttaagtgtagactggcagagcccggtgcccagctaatgccgtctgtgcagcttcattcctggcccttttgtagcgggcacagccgcctctcctgggacttgattaatgatgacttaaagaaggttcttgaactcatttctcagttactgacttgagccaaaatgtatggatgttggtctcctgtctagcacaactgctttcattttaagcattgcattagaaataatgttgtattcatattttagcaaagagcatcattagctctttaagaaccgtacccccagtgacttagcaaatttggtggcggtgactctaaacagctagcactttatgggagttgcttctgtgccttgaatgttgtgacactgatgtggggtcacaggaaaaaccattttatttcctaaagctgtttatttcttaatattgaggcaatggaagaaatgaggaaacggccgtgggcaggaaggtagaagaaaatgcagcacttacattacaaactcactttacttgggttttagtttattttgcttcagttttttgttttttttttttttttttttttttttttttgagatagttttgctcttgttgcccagtctggagtgcaatggtgtgatctcggctcactgcaacctccacctcctgggttcaagcaattctcctgcctcagcctcccgaagtagctggaattacaggcacttgcaccacgcccagctaatatttttgtatttttagtagagatggggtttcaccatgttggccaggctggtcttgaactcctgacttaggtgatccaccggcctcggcctcccaaagtgccgggattacgggcgtgagccactgcacctggcctgcttcagcttttatgaaggcaagtcaggatgtgttatcttggccaagagctaagactgagaccggagtagaggaaaatgactcatttgacattacccttctttctgaatcactccaaaagtccacagtcaaatctcaattagctggtataacacaagaatgcgttgaccctgtgagcagagttttattgcatcttcaagggtcttcgtgagattggtttatttggtatgaggtcttaaggattttaagttgtccctttaagcatcagttctgatacagatgggaatagagctaaacaaccagatatatgaagaccatttttgataccaccatacttgcggggagcttgcatttttttaccaaggggcagactggataattgagtaatttaaatacttgggactttgttaaagaagctgttgggggaaggtgagcctgggtgagtggtggagggtgatgtgcagcatctgctgggccttcctgcctcttggtatgactgctcagctcaggagttgggtgctttagggcccctaccatgcagtgcggtgaagccccgcccctgcagtggtttgtgcttgtctgcacgtaggagggaacaagccggctgcagtaccttcggtggcctctgagactcacctcccccacttctgtccatagacaaagctcctggggagccctaagcctctttcctcatgccagcaagcagtcttggaagcaggctggggctgcagtgggagagatgccaagaccagttattcaagggcagtgaggttgccagtcctagcatttcacactgtggaccagcacagctgctggctgaatactgcagtcaagattctctgaagggagtcctatcccttccaaacatcttcagtttacttgcagataatgtttcttcattttttattttattttattttattttatttttttgagacggagtctcgcaccatgacccaggctggagtgcagtggtgcaatctcagctcactgcaagctccgcctcccgggttcatgccattctcctgcctcagcctcctgagtagctgggactacaggcaaccgcaaccacgcctggctgattttttttgtattttttagtagagacggggtttcactgtgttagccaggatggtctcagtctgctgacctcgtgatccacctgtcttggcctcccaaagtgctgggattacaggcatcagccaccgcgcctggccatgtttcttcaattttaaacaactgatatctcccttggccatgaacgaaaaagaactgcccatcagtggagtcagtcagggcacataagacacactgtgtccaccatgccatttcagaggagatttgattgagttaagcagggaaatagagatgttgtaaacgttgaaactatctgggtatccctctttggttattaacattagatgagcagaaaaacaaatgtcaccgatgggcaaacatttaaaaagtctggcagtaccaagtgtggaaaaaggtgtggaaggcagcaactcagcgttcattgatatagccactttggagagcaattcagccttatttagtaaaaatagaaataaacatactccatgacctaagacttcaatttctggatatatagaaactcacacagtacagggagacatgtactacaagagtattgattaatagaagaaacttagtttaacggggagggagagtggccaccagtaagacagtccataaataaaatggtctgttgtacagtggactagtgtaacagcttaaatgaattagctagatccatatacccactggatggatcttaaatgtgctgctgagtgaaaaacaagttactcagtgatatatacagtataccacttagggcattaagaaaaccacaatattatagggttcagtatagacatagatacactgtacatagacttcagtgaactggaaggatatagagttcatgacagtgattgggtgtcaaaatgcatgatgtggctgggagcagtggctcacacctgtaatcccagcactttgagaggctgatgcaggaggatcacttgaggccaggaggtcgagaccagcctgggcaacatcgcaagattcccatctctatttaaataaataaaatagaaaaaaaagtttaagatggaggtggaaagggttggaggagcttggggatggagaaaaaatgaactgtataaaattaaaattcttgtttttgtttttagaaagtaaagagggccgggcacagtggctcatgcctgtaatcccagcactttgggaagctgaggtgggcggatcacgaggtcaggagattgagaccatcctggctaacacggtgaaaccccgtctgtactaaaaatacaaaaaaaaaaaaaaaaaaaaattagccgggcctggtggcgggcgcctgtagtcccagctactcaggaggctgaggcaggagaatggcctgaacctgggaggtggagcttgcagtgagctgagatcgcgccagtgcactccagcctgggcaacagagcgagactccatctcaaaaaaaaaaaaaaaaagaaaaaagaaattaaagaaaatacagctcagcctttatttgtgtttttttttttttcctttttttctgagacagagtttttcactctgttgcccgggctggagggcagtggtgcgatctccgttcactgcagcctccacttcctggattcaagcaattctgtgtctcagccacccaagtagctgggattacaggtgcgcgcctggctaatttttgtatgtttagtagtgatggtgtttcaccatattagccaggctggtctcgaactcttagcctcaagtgatctgcccgcctcagcctttcaaactgttgggattacaggcgtgagccaacacagccagccatggctcagtgttaatggtcagttctgggtggtagagaggcagatgttaaaacttttttttctttaattcgtaacatagaagcaaacctataaaggctgccgtaggaagaccagtcatagtaactagttcagtgctcttggagagttggcactgcctttcctcctttatccccccgactagaatgcagggcagcccttccagtaaatgttgagccagtgcctcactttgctgaggccatcacccaccttagttgcacttaagaggaccctaaatcagggtcccaggtcccttgctgattttagagtgtggatatcatacccagaaacaccgccctacttttaatcctagtaaggaggcaccatgtcccaggacaactaatgcttcccccaaaccacctccttcaggctgaaaccagttctctgcactgagcagctgggatggaaccaggaaatcctcggcatctgaggacattgaggggtctctgacttagggcttcttcacctgaagttgagtggtctttgagggaagtaggcccatttagcatcagctgctcttccctattccacactctagttggaaataggaccttaggttcctgttgacaagtcatttactttcagccccgaagaaataaaagagccaagattttttttttttttttaaagccagggaattttactagaacctacaagtgggctcattttgttctgtgtagcctggtaacaccatactgctttctgctgtggggcctcctggggttaaagtgtgggcttaagacccaggtctcttagctagaagatatcttatcctctgtatcctgcacccatatgcaaatacattattgtcattacccttaactatagatgaagatgaacagtgcctattccagaccttactaggttctgctggcccgtcacccattttgatcatgttgctggcctagtttgattagggcaaatcttagaaactccatttccattgttgaggaagagaactagagagcaggctgacctgaatgccagcgtatcatgatgcagactttctaacggatgcaggtgttcggaagagttgtggatcgaaacgccttcatgatggcttggaggtgtaggtagcaaactgacgtcacaggaaggaacacaatcttgggtacctactggcaacgttggagggagaaagtgagcatcaggtgccatcattttatagttgatctatgtgatgaggttggtatcggagcataattggtacaaaggaaaaatgacttaggcagatgcagactcacgggccaggctattttattagggcagaatgatttggtcctttgtggaagaattggtggagtgaagcgtgaatctttcccagcacaacccaacaacagtcctggccctaagaagtggagcatgggagttgggtgtggttcgtgcctgtagtcccagctacttgggatgctgaggctggaggatcgtttgagggtgcagtgagctataatataatataatcacaccactgcactccagcctgggtgacagagtgaaaccctgtctgaaaaaaaaaaaaaagaaaaaaaaaaagttggagggaggagtgttgggtattttttatgatttttgtctcctggtttctgaagaatggccaaaaaattgtgtctgacacaaaggaaactaatataaaaagccaggagctgtctgagatgagaaaggaaagggagaatagggcacttggagctgagctgtgattgtgcctgttccaacctgtcactccagactaaggcctcttagagatggtgtctcctttctcacagaggagacatggctctgaggaagatcttactgcaggggctcgggctcaagaataaggctcctggacctgggcatggtgtgtgctgctatcagtggatacgccaggcttccactgctggctggaggttggctctgcatgtctgtgccttcctaggaggaggatgcaatagtgagtcagactggcatgggtggggccacatgtcctggcaggcactgtccaggcagctggcatgagggagaggagtctttcccagaagtccgccctgagaaaccaaggctgggctgctctcctggagccaggggagtccagtgagtgttttacatacaactctaggtacgtggttggtgggatgggcagtttgtgctgggaagaggcttgtggaggattttggagaaggcaggagagctctggccctccctgcaagggaggcttcaggtcagagcctgaggaaagacctgggcatgagatatgaggtctctggctgggtagagagcatgaaggacacatgagatctggagtctggatgaacttgctgacaagcaagctttttttgactgctaatgcgtaaatccactatagaaattttcatttgtcatttttgtacttattggcaaaaaattagagcttataggcatcagatttaatttgagatagttgaaatagggtttgtgtttgaggccaatataattttatctgctaatggcatctcgtggacttggaggcagcccttctgtaccagaacattgtcaaaagcttttactgtaaagcttgagaacaaactagtttgctggatttgggcatgtaactaacaggtttgaggcatgggattatcctgtggacttttttttttttttttttgctttgaggttctgaatgtattaaggttgaccttcttaagccgttgaaactgttctgcagtacatttgtgatgtagggcctaagacttgtatcgttttttttttttaatcacaacccagtgtacagaacttgagacatgcgtcttttctctgccaccttttaaaagcagattattcttgaagtgcatagagcagcaattgattaatggaattggtgtcttcacatttcatttacttcctcccaacaattttataggatgcatataaatatttccaaaagaggtacacataatttcttactataaaagtatttttatatttatatcagtaaatttgttaataaagaggatttttttttttctgtaatcctaccaccccaatgacgtcctattaaaatttcagtatatatcctcccaggtcttttaggtatgtttaatttggtgtcccttccccgctcccaaaaggggagggaccaggttcttgtatagaatagtggaatgttagtaaatcacaggtttaaagagacataacagtggaatctctagagcagctgtcacctggatacctggttattaaggtaatttttccattaccccaaagagctttagttacactcagctttttccttaatccttgtgcagctctccagggcacaccgtattcagctctgagcggtctttgctagtgaggccaaggagccaccctgagccaaaaggggagcattatgtcaccggaagcccaaccccagagaaccaaaggtatgacctgatattcagtggccccagccaggtctttacaggaagaccctcatatctcaggtctaagaagagccagctgatggtttttaaaaagagtggaattagttactccaacccacttattcagatcttattttgttcacaatacagtccctagattgtaggcccattggaggccacagcaaagcctttgtgttccagttggcctgatgtgccatctctcagtaatgttcccttaacagccagacttccctaagcccagctgggagctctgaaggtatgcgagccctccctcaaccatgagtgtagggaaagggaccaggggccccaggctttcctgtcagtaatgcagaagttcctcagatttagggaagggggagcagaggcataactttgattctgacaaagaggcattcagagagactgaaaggtcatttaacaaacactggaatgcttccacatactaggtgctaggagatacaaaaccatataggtcctggaagggaggattgattttttcattttggtacgtagtagatattaggggcttaggaaatacacatcgaaatgaagagtgcatttgccatgttgaaccgttagccggtatcttatttccccattttaaaagttttagaatctgtggttgaggacttgtggccatcagttttccatagccaacagactgttcactactgccttcagagctccttggacctcagcgggccttctttggagatggcagagatggatttagatgtatactctactcgagccacccagagagcccacaaagtcagagatggaacagggtaaaggagtaagggtcatatgtgtgagatgccttgatttggaactttgagatttaggatgaggtggggaagggctaaagaggagcttgttcctgagccttgcttggccgaagcatttaggctcaagcgttttagaaagagtagcccttggtctgagaactcaaggaaacagctttctgatgagacgtgtagcaagcttctggttcacatccttacctgatagttcttcaaacactgcctggtctggttcacatccttacctgatagttattcaaacactgcctggaagcttctcctgagtttttgtctctaatcagctaactaacaggctgagtgagtttagttgtaagtcattaatgaagaaagcaaaggttggggccattgtcagggttgtgacctgggctagttaattacctggaactgatggtctgtgttacagagtggtggtatacttgtcaggcttagaaaagaaatcaggatgtgtatcaaaaatcatttggggaaaagatttgaccagcaactttaatttctctatgtttgcaactatcctgttaatgtagttgtgataatttcagaattataccagtgcccttatgttatccttgctttgcaaattgcaaattgctttgcgtgtcctgacatccttctggccaacagtagatgtggttttaggtttagactcctgggatggaagcttttgcattcaggggaatgactttgggtttgggtgaggattgtaaagaggcaatatgggtgccccacgacaaagcagctatttgtagctttgtgacagcttgacatgcagagatctaggcttatcaaggcactaagctaggagtcagttgtttgtatcactggaagattggttacaacttccttcattggaagctccttcagtgcatgttaaatgatgttatttatagatagggtggtgagaaagctgtctaggtagatgtcagtcagcccagtgtaagagagacctgcttactgtgggtgcttgggactatgtggagtgggtgggaggttttaacttgttcagtaaggtcctttccattgttcacaatctggtgaaccctttttctaacatgaggagcacccacataaccagatcatgtctggcttccctgtggcttgtgtacaaagcgtgcttattgagttaatgtgtaagcaggagacagccttctgtgctaaatggtatattaaccacttctcagtcttaccactctctttcaatttgtctcgacccaggacctcagcagccatgtcgaagccccatagtgaagccgggactgccttcattcagacccagcagctgcacgcagccatggctgacacattcctggagcacatgtgccgcctggacattgattcaccacccatcacagcccggaacactggcatcatctgtaccattggtgagtgggtgtgccccttcccccaaaaaagggcttcatgggcagtgacctttctctcctgaaaagagtaactaaatgtcctaacaaacctaggtgctacatgggatactacacagattcttatgaaaggactcaggtcataggaagttgcagtaaagaattagtatgtgcataggatggcaaatacagttaataagagagtattagacatttcaaaattgctaagatggcgaggtatggtggctcccagcactttgggaggccaacgtgggaggattgcctgagcctcgaaatttgagaccagcctgagcaacttagaccctgtctctccaaaaagtgaaaaaaaaaaaaaaaaaattagctgggcatggtggcatgcacctgtagttctggctacatgggaggctgagacaaagatcacttgagtccaggagattgaagttgcagtgagccatgatcacaccactgcactccagtctaggcaacagagcgagatcctgtcttaagaaaaaaaaattgtccgggcgcagtggcacatgcctgtaatccagcacttcgggaggctgaggcaggtggatcacctgaggtcaggagttcgagaccagcctggccaacatggtgaaatcccatctctactaaaaatacaaaaaaattagccgggggtggtggcgggtacctataatcccagctacttgggaggctgaggcaggagaattgcttgaacctgggaggcggaggttgcagtgagctgagatctgaccattgcactccagccttggcaacaagaacgaaactctgcctcaaaaaaaaaaggaagaaaaaagaaaaaaacatcgctaagagtaaatttcaaatgttctcaccacaaaaatgttaagtatttgaagtcatggatatgttaactaacctgatttaattattccacattgtatccaaactgtatgtattggattacataactttgtaacccaaattataaattaccagtttataataaaaaataatttgttgcaaaaagaatccatatggtttaggttttatgctataggcaaaatttagaagatgttttccttagcaggtctttgtaggagcaacttaaagacctaggaaagatctttctaacatgttctgtgctaccaagattctgtggttggacatctggctgggtttcagtgagggtggagaaggctggccaagtcttaacctaggcttttctgatacagtgggagcctgcagaacttgaaggaaatggtcgaagtgtcccagtagatcaagaaagtaagctggcacggtagtagccttccatgcactttttaaagacttttgagctatttgggagaggaaaagttttcagggaaaaaaattctttaaacttaagcaaacttaaatgtttttccttctttgaataattaatacttgtggctttaaaacttttcctaataggcccagcttcccgatcagtggagacgttgaaggagatgattaagtctggaatgaatgtggctcgtctgaacttctctcatggaactcatgaggtgagctgtggctggaccctatggccattgtgatggcctgtaggaaacagggagggggtgcagtgttcgtttagccacagtggactagacaaggatgagtctgagtttcacagtcagtgtgaagtttgtctttactagcccatccctactctccttccctcttgtcctgacaaagcaactggctgagtctcttttagcaaaaaggaccccctttgttgctggctgtggttctcccacacacctctcctacccttagcttttacaaaggaagatatggaaaggttctactggaaaaccctctaagccttaggtgtcctggccacagcgcttgactctcctgtcccagggtttctgcttcaccttgtgttgccatggtaaaccatctagcagattgattctagcttagaaccaaaataactgggcaggtccatgagaacggtttccactattctaagttttgagggactgagcctaatgcataagcactatctggggtgtaataccccacttcctcagcactgtattctcagcctgtgccttcccaggggttctggtacattaaaataacaccagttagcactcttccccaggagcctagtaggactgtatttgtgctgggctctttattagctggctttacctatggacagaggccttgcccaggagccaggtagcagctgttgggatggctccattcctgcctccattgccagatttagaattaacccattctgaggagcttggggttccctgaggtaccatgacttatttatttttttattttataaaacaaaattttgctctgtcatccaggctggactgcagtggtatgattatggctaactggatccttgacctcccaggttcaagtgatcctcttgcctcagcctcccgagtagctgggaatacaggcatgcaccaccacacctggctaatttaaaaatttttttgggggaaatgaggtctcactatattgccttggctggtctcaaactcctgggctcaagtgattctctcaaatgttgggattacaggaatgagctaccatgctcagcctgggattgtgcctttttaaaaccttcagacttaaccataggtttcccatagatcatgggatttcgtaatggcattgataagaggaattacagaagaggcaaactttgcacctgtcttggcttctgtatttcctgttgagagtaaagaaaatgctatcctgtaaggccaattgccttacagaggttgccctctggcatttggaagttggtattaagtttggactaaaaataaagcctcaggaaatgcaatccaagagtgaattcctccttttgggaaacacaagactcttcatcatagattccctaacctgtgttcataaacagcctatggcctggctagtggctggcccttaaatgtcatggggacctgaccaagtccagcagacataccatgtaggttaagacatgtccctgtaccttttggaaaattctgtagttttccaaaagcaaggggtccttagcaggagtcaccgagaattacttgttagagaattaagtgttagcttagcttagagagagctgaagacaatgctggaggtctgttcgctgttgatccctgctgctgtagtctgccatgggctcctgcattcaggggaaggagcagaaatagatttttaagaagttgacctttaagtaggctttatggttccttcatccagtaaaataacaccacatagctctaacatggcaagggcgagtgatacctgccacacctgctggatgagagctggctccgattttggtattttaaactttaagaggcttttggagattatctctactttcactcctattcccagattataattaagatttattttttattttttatctatttattttttaaagatgtccctcttgtgtgttcattttgaagttttagaccaagatgaggttgtgtgtgggctcagcttggaaactgatctgaaattattctaatttatataatgtaatgtaaacagtttcagccttaccatacgtcagggctatcgtttcatgtgcacctttgactaggggctggggcgtacttttccagtttctgactattttaaatgctcttctgagcagaacgttgagattactgtcttccctctcactctgacagagggacatcaaatgtctgcatctgatcttttaacagctttttttttttgagacagaatcttgctctgttgcccaggctggagtgcactggcacaatctctgctcaccacaacctctgcctcccaggttcaagcaattctcatacctcagcctcctgagtagctgggattacagacctgtgccaccacgcccagctaatttttttatatttttagtagagacggggtttcgccatgttggccaggctggtcttgaacttgtgacctcaggtgatccgactgcctcggcctcctaaaggcgtgagccaccacgcccagccctcttttaacagctttggcaactagtcttcagccctcacttttggcagttcacatgggcaagatgcattcttgctgaacatgtggttccatatgccatgttttccagatttatttatttatttatttatttatttagagagggagtctcgctctgtcatccaggctggagtgcagtggcacgatcttggctcactgcaacctctgcctcctgggttcaagagattcttctgcctcagcctcctaagtatctgagattacaggcacctgccaccacacccgactaatttttgtattttagtagagacttggtttcaccttgttggccaggctgatctcgaattcctgacctcaagtgatccatccgccttggcctcccaaattgctgggattacaggcgtgagccaccacacctggcctagaaataatgacttttaaacaacctaaatgtagagccttccacaggacagcattgatggatgctttaccacataacatcccaataaagccacagctgaagtggaagactcagtacacctcccagagatgctctaagagattatgatatatgacatagatttgaataatatacctaataattggtatgtttataatatatggttttacatccccaagaccaaaaatgcatgtttgcatgaaacactcatggttacaaaaatatattaggccaccaaaaaaacccccacgtttcataaagtagaaattatacagacacattctctgataaaattttttagtggaaattaagaacaaagtcaagaaaactgaagtgtgcttactttagaaagcaaagatctcaaggtagatgaaataaatatttaactcagaacactaggggaggaaaaccctaaaaagggtgaagaaaataattttgtaagattatagctcaatgaaatgaaaataaatttgacagattaagctaagagctgattctttgtggggaaaaaatagtaaaatagaaagttctgagaagccaggtgaagaatgcgaggatgtgcaaataagagtatgaatagaaaagagaatatttcctacacattggagattttaaaagtcaagaaagacttataacttaattcctatatagagagatgactctggctattttcaaagaaaagataaatatccaaaagatagaaaatatgaatagaccagtggccataagaagttgaaaaagtgggctgggcgtgcggtggctcacacctgcaatcccagcactttgggaggccaaggcggagggatcacttgaggtcaggagttcgagaccagcctggccaacatggtgaaaccctgtctctactaaaaatacaaaaattggctgggcatggtggcacatgcctgcagtcccagctactcgggagcctgaggcaggagaatcgcttgaacctgagaggtggaggctacagtgagccaagatcgcgccactgcactccagccaaaaagttgaaaaagtgattaagatctggttcacctcagaacacttaagtccaaatgattttagtggctgaattgtctccccttcaaagttcagttacattgttaaactgttccagagcctagagaaatatagaaatcttcccactgtgttctttgaaaccaatatacgctgatactgagatcaaacaaggacagtaccaaaaccaggcaggtactaacagttagtgtgctagaccagtctcacttagatgcagaaaacaaataaaatttaataatccaaatccagtagtgattgaaaggaatgtcttgatccatgaccaagtagattttattctaggagaacaaaattctacatcgggattaagtagagttaaggttgacatttttttttttttcttctgagacggagtctcgctctgtcacccaggctggaatgcagtggcacgatctcggctcactgcaacctctgccttccgggttcacaccattctcttgcctcagcctcccgagtagctgggactacaggcgcctgctaccacgcccggctaattttgtttttgtacttttagtagagacggggtttcaccatgttagccaggatggtctcgatctcctgaccttgtgatcccccctcctcggcctcccaaagtgctgggattacaggcgtgagccactgcgcctggcctgagttaaggttgacttttaaacaacctaaatatagctaaatatagagccttccgcaggacagcattgatgtgtggaactcttatccacgtgataacatcccaacaaagccacagctgtagtggaactcagtacacctgagtcttatcattataagatgataataggtaacatttattagataattaccatgtactttgtcctaatacttcatgtattcttttactcctcacgtcaactctgaaggaaaggcaccacctatccccttaaaagaaaacaactattactattcttttttttttttttcttttagagacggaatctcactctgtctgtcgcccaggctggagtgcagtggcacgatctcggctcactgcaacttctgcctcctaggttcaagtggttctcttgcctcagcctcctgaatagctgggactacaggtgcacgccaccacgcccagctaatttttgtattttaagttgagacgaggtttcaccatgttggcctggttgttgtcaatctcttgatctcatgatccacccgccttggccttccaaagtgtttagatgacaggtgtgagccaccgcgcccagcctctattctattctattttgttctatttctattacaagccagtaagcaagaaaatatcataatttataaggaaccctataaaaaacagacaagccaagggtctgtcattaggaagtatgcctgaataagaagctgaagatttttagacacaggtttcaggcaacactgtctttagaggctaggctctggctccagctccctccagcctcctgtgaataacaggcaggcttacttgcaggtgccactttcctggacagtggtggttaaaggacaaggcccagaaagtgctgaattaggtgcccttgttaccgctaatgtcttattgatgacactatcttagagctcttttgacatcttggctctgcgtcttttttttttttttttcttgagatagggtgttgctttgttatccaggccggagtgcagtggtgtgatcatggctcactgtagccttgacctcctagacataacccacctcagcctcacaagtagctgggaccccaggcacgcaccatcatgcacagttaatttttgtgttttttgtagagacgaggtttcgccatgttgcccaggctcatctcaaactcctggcccaaactgtcctcccaccttagcctcccaaagtgtttggtttataggcatgagccactgtgcttagcctgagtccctcttttaaacaaacaaaatggtaaatggaaaggaggaaaggcttaagaaaaaagattgaagccaggatttgttgtaagcaaggagtaataaagggcagttcatttagagaaaggcatatgaccacctttccccctccaatcagaatctagaaagtgattgaggccgggcgcagtggctcacgcctgtaatcccagcactttgggaggccgaggtgggcggatcacgagatcaggagatcgagaccatcctggctaacatggtgaaaccccgtctctactaaaaatcgaagaagttagccaggcgtggtggtgggcgcctgcagtcccagctactcgggaggctgagaggcaggagaatggcgtgaacctgggaggtggagcttgcagtgagcctagatagtgccactgcactccagcctgggcgacagagcaagactctgtctcaaaaaaaaaaaaaacaaagcgattgagaaaatcaggtctgtgtgaccttagcaatgagttatttagcttgggccactgttagcttaagtcaataacttcaagtttgcgttgtagttggaatcaatagaggaaaagctctcagcattaccacatatatcagaatgtgacattgattgccagaccagccttatccaaacacaagtcctaggctttttgccctgtttatgagctttatatgctgagggtatttgatgagtcttagggaaaaaagaacagccctggggacacagctgcttttatgatgagacatgtttgcacccataccttaatgggttttggtggcaatattctgaaatttgccacctacatttcaaagatttgccctttgggtgaattagtgctgtagtagaagtgggtggaggctgaggaggttggattaagcaggtagaggatttctcagtgcatggatcgtgctgaggatggagatagagctctaagacatccacgggcctttcctgagtgatcagctttggctcctgggcaggggaattggagctggattctagtgtgggagcacgcttgtcatcttccttcttttcccccagtaccatgcggagaccatcaagaatgtgcgcacagccacggaaagctttgcttctgaccccatcctctaccggcccgttgctgtggctctagacactaaaggacctgagatccgaactgggctcatcaagggcgtgagtattctgcggagagcgaggggaaggctcagtaggcaatatgccccagagacatgtcctccaaagcgctgggttgccatgtttcttcccagtactatgaaggactgcagaggagttgaggtctacaaatgaggatttattcatcactgtaaacaatgttgatttgatctactttgctaggaaatggtaccacaaaggaaccttttttttttaccctaaaaacctaaactttaggctttctaacttggagaaccatctctttgtatctttttccccatcattaagtagcataactgaaacatattcttttcttggattatttccgtgaagtatacagagttagagaataagagcaaaaaactgtattacttttagcagtgacttgagcattgttcccgggaggaaagagcttttccattccttctgaggtgatgctgctactggtgtctccagtttggactcttgcttactctcttgtccctagagcggcactgcagaggtggagctgaagaagggagccactctcaaaatcacgctggataacgcctacatggaaaagtgtgacgagaacatcctgtggctggactacaagaacatctgcaaggtggtggaagtgggcagcaagatctacgtggatgatgggcttatttctctccaggtgaagcagaaaggtacgtatgggagctggagtccagttgtctaaaacagtcttttgtctctaaacttccttgacacaaggaagatgggaaggttggttgcctggcagtgagattgagtctgtgtgttctcaggaatcccttttataactcatttatcctcaaagataggctttaatccagcatagttacattcttctggttctggagaacacaggaacatacatacatatatatatatatatacatatatatatatatatatatatatatatatatatatatatatatttgtttcgctgtgttttgttttgttttcaagacagagtctcgctctgttgcccaggctggagtgcagtggcatgatcttggctcactgcaacctctgcctccagagttctagctattctcctacctcagcctcctgagtagctgggattacaggcacccgccaccacacccggctaatttttttgtatttttagtagagatggcgttttgccatgttggccaggctggtctcaaactcctgacctcaggtgatctgcctgccttggcctcccaaagtcagaacagtcttaattatccttatttatgggtgaggaaagtgaggtacagagaggttaaatggcttgcccaggattacacagtgtagtaggttttcaactctggtaaaacagctccagcacccataatgcaccacttcccagctcactgtccttgcgggaaaggtgcctgcttcctgttgacctgtgccctcgtgctctgcctcccctacttaccctttttcatacaggtgccgacttcctggtgacggaggtggaaaatggtggctccttgggcagcaagaagggtgtgaaccttcctggggctgctgtggacttgcctgctgtgtcggagaaggacatccaggatctgaagtttggggtcgagcaggatgttgatatggtgtttgcgtcattcatccgcaaggcatctgatgtccatgaagttaggaaggtcctgggagagaagggaaagaacatcaagattatcagcaaaatcgagaatcatgagggggttcggaggcaagtccccgttgtccctgctccagtcccagcgcagctctccgaagggcatggtccatcctgtgaatgtctgattcccagcccctagcccatcagaatgtagactcccaagccagttccaaacctgctgaatcagaatatcttaggagagtagaaggcattatgtttttttgtttttgtttttttgttttttttaaaaaaaagcttcccaggtaattgagatgctggcagcttgacattgttccctgggcctggggaccaacatttgagagaacagggtcactgctcacaggaccaggggccatgatgttctgttcctgatcagaaacactaccagtgtttgctggaatggggggaccagggggaaagatgacagcagacacttaagaaagggctctttttggcccttcctggggagccatgtggaatttcagggcctggtgtccatgttaaagcttatggcctcctggtcttcacttagaatgcagctggctcagtgatcatgctaactctggtatggtccattccactctcagaggaagatgtgtggttcttctccagtttcagattgccccaacttagcttaccccctccccaatgctcacaaagtagagcccagtgggcatggccaccatttttggcatcctgctaggaatacaactcagcacaactaagatgctagacacactcttgtggattagaagtgtgtttggggagggtgggggagcaaccctgtgcacccactgtagtggccttactgtctgagctttgtgtagatatcctctgtaccaggcaatttggggtcctcccctttgccatcctgataagccataggctagctgaacttggccctaggccaggcaaagccacattccctcttgccttcagcaggttggagtgggccacctcaaagggcagtcctcaagtgtccttgactagatgaggccatgggtctttgtggtggaagcagtcatcaggcctcaggttccctgtcttgaagtgctgattggaaaatggaggccctagagagacccctaacatgcatgggatttggagaggagaccttgggaatgagcccatttggatttgccctctcccctttcttccgtcaatgaagcatccatattggtgttgaagcccagcaggcagaattgttggcccactctgggggcctaaggtagctggactgccttgccatctgtgtgcacccatgatgatatcatggatgtctgtcctggtacaaggacatctaagttagggaatcccagggaaacttcttgtctactgccatacttgtggcctctgttctatataacctctctccccccaactttgtccatcaggtttgatgaaatcctggaggccagtgatgggatcatggtggctcgtggtgatctaggcattgagattcctgcagagaaggtcttccttgctcagaagatgatgattggacggtgcaaccgagctgggaagcctgtcatctgtgctactcaggcatgtgcccacccttccccacattctcatgtgcacactcgcatgtttgtatgggaaagctctggaggctgtctgatctcttcccatggaattgtcgcacgtaacacacagataatccccttcccccatgtacctacacaaagccatactctgtgtacctactcactatccagaggatcagcttgctgtcatttgtctctgaagacagctcaagctacatctcactaatgctctgtcccctcccagatgctggagagcatgatcaagaagccccgccccactcgggctgaaggcagtgatgtggccaatgcagtcctggatggagccgactgcatcatgctgtctggagaaacagccaaaggggactatcctctggaggctgtgcgcatgcagcacctggtgagttctggggcctgccccatcccccagggcttcggactgggcctgggatggatgcaagctctggtgcagagctttttaggtttctccatcctcttatgcacagcctttcattatcctccaagttacagcagcaagagggtgggggtggaagtggaggtggcttttttttttctcctgttctgcattcctgcccacacccccacccctccatttccttctgctctggaggcatcctccttcattggacaccacacagtttatttcacttctgacttcaaggttgtgaattcttcccatggcttaagtcctgggatacttctgcagtgaaaggaggtcttgtacctcttcctcagagtcagaagttctgagtacctttgccctattctgaaaagggctaggggctcctgctcccagctgccctcttcctttggcttccaattcagttccctctgccccgcatcctgcagacaggcgctcccgcagggggcccttgtggacctgcactggagtctgttgccttcactgagctgcctgtgctggccttgcatggtgcctgtagggggatttgctttgctgtgccattggggtacagctgctgctcttactctagaccaaaaagtcgggttgagtgactggtggcagggccacagatagagacagcggggagggtggctgaccctggcggccctggactgagcgtctggaggagtcgtggaggctctttcccttctttctcctctgagagctcgttcttcaggctcttccagcttgtcatgtcgagtgcctggccactgctcagggttggaggctcagtccctttgccctgtctgttccagctctggagctaactcagggatccctgatcagggttacataggtttggtaaaatgagtgctggaaattaactttctcccagtagtcttaggtcatgctcagtgaacttaaactttatccagatatggttttccttcagcctttctattccctttctagccagtgaaagacccgctgccctttgacctcagcccctccaagcccccaagtttaaaacgccaccccctgccaccagaaaaaacagaaaaaaaaaaaaaaaaaaaaaactaaaacacccatctggtctgggcatcttcctttcctttttcactatgtatcctgttactgggcttaaacagctttcagagaagagatgtcatttctattaaatgctctttcagtagcgaactgagttcacacttgactaaggatattttccggactgtctgtcatcagcatccttagtgggtttccccatatttaaattggtagaggccagggatggtggctcacacctgtaatctcagtactttgggaggccaaggtaggtggattgcttgagctcagaagaccagcctgggcaacctggtgaaaccctgtctctactaaaaattcaagttagctagctgggcatggtgatgcacttctgtagtcccagctacttggagagggggtgatgctggggcagcaggatcgcttgaacccaggaggttgaggttgcagtgagccaagatggtaccagcctaggtgacaaagtgacaccctgtctcaaaaaagaaaccaaacaaacataaaaaaaaaaacaaaaaaatcggtagagagtgatttctctcccaggcccacttaatgtagactgggcctggctgacacctcaccattcgtgtgatgtgattgctgttctgatgcttagatactcttggcgcagtctcacaattgccaccatggtaggaaggtgtcccaggagacggtgcaccttgaaccagtcaccactaaagtggctgcctttctgggtctctccacacatcccctctctctaatttccctacttaatcgtgtgacttcatggtctcaaaggaggaacagaggctgatcttgacttagatatactgaaccatgaaatcactgcatagaatgtggggacttgaatgtgtctttgggcaagtcatttaacctcttaagacctcatctgtaaaatggattagatatgtttaattatagccttagcattaaatattcattgctgttattattaagtgtctgataagtctctgtgtacatggatgtaatcttcctaactcccattacctccatttatagatgagggttatatggccaataaagcctgggtttgaatctaggtctactgcctccaaagccagtcttctctcctgcaacatcatgctctgtctagcaggagatgagaacaggtctccatttggagcctgtcagtggggtcagagactaagattcaggctcagggtctaaattccatatcctttcttccataccctggtgtttcctatgaacagatagatactttagggctgcaaggtttggattgcatggcactgctcagaagataagttacaggtctgggctaggctgtagctgcccctccaggtggctagacctttcctttctgtgtcaccagttaacactggccaacagttccttccattaactgttcactgctttctcctgtgtctaactgatgcagtttatgacccataactaagagcagtaccaggtatggctctgtttcctgttcatgtcccctgtcctctgggctgcatgcattccgttcttacagaaagaatacctttaacctagtacatcctgccacacatctgcttctactgtgaaattgatgagggggtattaccgattcttccctcacccatcatttactgagatgctggtgattgcattataatcctctaaagcttacattgtctttctgattcttggtcttatctgagcaagtgatctataaataactcagtggctttctcatgactgttttaattattagattttaatcaagtgtcttattaaatatatctgcatgcttccacaggcatctgtctcttcacatggctgttcagtgtgcctctcacaagttagcccacgttttctgttctcctgcttcaaactcagttgagctgccttgctttggctttgatcccagctttccagcgctgctcaatctgttgccatggcaggccattggaaaggctcagtgcatccccgtgcctgaagccaagtgagcgctcactccatgcatgcatggaggctgggcaggagcctgcctaatcaaccagccatgtgaggagggagggcctgttccttcctgtaagctatgtcatgaggcagcgtggtcaagtcctctgccagggagtggcctgggcccagcctgggcatgttttcatgccagggtgctagagcctactgccagattgtctccctccacccccaatgaaaaaatccttccagaagggaagagccaatttcccctgtattggaggggaagtggcagcacctcctgaagcagttggactttcatcaccctacctctgcatctgcctgaaggacagatttagccaattaacctaaggttaccttcctctctgataaattccccattctgtcttcccatgtgttgtgtctcgtttttttcctcctccttccctcttccttgccccctcttcccctaaaccttacagatagctcgtgaggctgaggcagccatgttccaccgcaagctgtttgaagaacttgtgcgagcctcaagtcactccacagacctcatggaagccatggccatgggcagcgtggaggcttcttataagtgtttagcagcagctttgatagttctgacggagtctggcaggtagggccctaagggcaggtaacactgttaggataaccagcctcttgctccacctgctctaggagaagacagccaggcccaacctggcatctgggcacagagcctcttctcgtctgtaggaacaccgccagggaggtcatggcagggcaggaccaaagggtcctgtggctcagtaggcacagtagatgtcacaggcacttggtgaaggactggtttctgtggagtcttgatcttggctcagctcagaatctccagtgattgggctcctcttggcctttgttcccaggaacatgttcctcaccagctgtccggtgactcttcccctccctctccttttgtgacaaagctctgacaaagctctgtccccctctcgtccctctggacggatgttgctcccctagattgcccgtgaggcagaggctgccatctaccacttgcaattatttgaggaactccgccgcctggcgcccattaccagcgaccccacagaagccaccgccgtgggtgccgtggaggcctccttcaagtgctgcagtggggccataatcgtcctcaccaagtctggcaggtaggaggcggcagcggctccctggaatgccctgctcagtggtacctcaccttgggggtcctgggagcagtccattgaacaatgctcaggtggcactgagccaaggtaagacccctctgcctgccaccttgggcctgcagggaaggattgagcagagccccttccctgggcccaaaggactctaggtagcactcataaggaatgtcagaacatttggatcaaaagcaaatttatgctggagatttattacataacagtgcacaggctgactacaaatggttatttgatattgaaaatttagtcctctaaaattgtaaaagataaccacttttgcttattccagttactatgtgctctttaaaaatttcagttgggaaatgaatttatttaaatgctgtttactgtgcctccatttggcacactagtccctgctgtttttgagccctaaagacaaattgggttccagctcaggagaggttgctgtgctatcttggctgacattctgtggggcctggcagccaggctgaggactgtgtggcctatgctgggcctccaacttgggatcccttccttggcccaggacattgagttaatgtccttcactctcctagttagggagtatgctccttgtccctgtccacagggcagcaagggtttcctggaagaggggagcaaacaggcagtgcccatgcactgaggagcagcagatgggcgtgggcagcccagagaaccaggacacaagctctgtgcagatgccctcagcagagggctccagcctcccactcttggctgaacagctccaacccgtagggttgacctttcttaaaaggtccagttcttgctgtttggctattttaagctctagtcttctggggtttcactcagctggtcctggcttcagcaattgcttccctctgaaggccttgcatagaggccaagcgtgaagtgcagggacttctctgctgtgatgtggcttaagtttccctgacacctgttgagtgtcctcataacttcccttctggtgcccctccccagctcctgagacacagctgcagctacaagtgtgcagtgtcagtgttcaagaaagtgcctggcagaggggctttagaagggtcccctgccttccaaaggagctttggcaggcagagctgctcctgcagcaacactcccatttcctgttcttgcctgctgagtagcacctagatttctaagcctcatctagatactcagatttgattctgggcctttatagcccagttgctgggactgtttcaggagctaggggccatgtggggcagggagagggcacaaaagtagagaagcctgatgttgattcccagggggctggtcagctctgctactgctccttgcagatgtcaagagtcaggtgctagtcacgtgctgcttggcttgtcactgtcattggcagcgagaggaatgggtgctggtgacattgggccagggctgcctctctgtgtcagagttcagggtgtaggaggggttctgccaaccatgggctgtgtggggtaagtgggtgaggctgatcttgctgggtcaaggtgatcctgagcccttggcctgtggaatgggggtagagggcaaatggtaacctagcatgctgtgggggatataggatgaggggctgcccgagcctcgggaggggtcctagggagcagatgttgaagaggccagagccctcagtgagctggatgagagggtgagctgtttgaacgccctgagggtacttcctggggcctcgtgtaatggtctcttctgtatgtcccccatcccatctcaggtctgctcaccaggtggccagataccgcccacgtgcccccatcattgctgtgacccggaatccccagacagctcgtcaggcccacctgtaccgtggcatcttccctgtgctgtgcaaggacccagtccaggaggcctgggctgaggacgtggacctccgggtgaactttgccatgaatgttggtacgtggctggagcaggggctagagcctagaggagcttggggatgcttgagcattggcttctgtgggaccccgaaagtttggggaatagaaaggggaacacacagaccttagtggggcaaaaggcccagcgactgttcctctcccttattgggaatgttcattctgaatctctcattctccgaagtcctaagctgagccaggagggaaaagggtcctttgagttgtagggctgagcaattcagttcctcttctcttctagtctggggctcaaagcaaaattgtccattttttggcatctgctcattactgagagttttttttgttttttgttttttttttaaataaaattggccacagctcctgtgctgtggggtggcatacacagattacgtactgatgtggccattgtccctgtataaggtagggtatcatcagatgacaggaagcagctagctctgaccctgggcaaggctttgcaccctctccaggatagtgaatgatgtccaaaggtccctgccaaccctgccatctgagtgataaggacatttcagggccttcctcctgtttgcctgggctgtgagtttggtgccaccttgtggtgtgaggaagtagtggtcagccagcctagttcagtactcaggctatggggcagctgcccaggtgcaaacctgcctggcttggcttttactcaccaacctcccttctcttcctccaggcaaggcccgaggcttcttcaagaagggagatgtggtcattgtgctgaccggatggcgccctggctccggcttcaccaacaccatgcgtgttgttcctgtgccgtgatggaccccagagcccctcctccagcccctgtcccacccccttcccccagcccatccattaggccagcaacgcttgtagaactcactctgggctgtaacgtggcactggtaggttgggacaccagggaagaagatcaacgcctcactgaaacatggctgtgtttgcagcctgctctagtgggacagcccagagcctggctgcccatcatgtggccccacccaatcaagggaagaaggaggaatgctggactggaggcccctggagccagatggcaagagggtgacagcttcctttcctgtgtgtactctgtccagttcctttagaaaaaatggatgcccagaggactcccaaccctggcttggggtcaagaaacagccagcaagagttaggggccttagggcactgggctgttgttccattgaagccgactctggccctggcccttacttgcttctctagctctctaggcctctccagtttgcacctgtccccaccctccactcagctgtcctgcagcaaacactccaccctccaccttccattttcccccactactgcagcacctccaggcctgttgctatagagcctacctgtatgtcaataaacaacagctgaagcacctgtttcctctcttttctgctggggagggggaggtggttgaaccctgccctctgagcaggctgggaatggctgcagcctcgtgccccgcagtgggagctatggtggtgtcacctgccatcctgcccacctcctggtgcagaggcgctgggaaagcagtagcttactatcttagggttacaggttgcccccttcagtgctgcggggagactttaatggcttacgtgaaccgaagatgggaaagagcagggacaaggcctccctcccactctggtagataaacccaaattgcaaagtggccttggccatggttcttccactttggtcttcctgcattagcgtatcccttatgggggctgtaggaggagtcagctctgggcgcctgagactgggtttggctccc

SEQ ID NO: 82 - RNA, 2516 nt, Homo sapiens
  source 1..2516: mol_type = mRNA
agtcccaccgaaagggcaacctgcccgcgcgttccgccaccgccgccgcgcttcctcctgaaggtgactgcgcccgcggggacgcagggggcggggcccgggtcgcccggagccgggattgggcagagggcggggcggcggagggattgcggcggcccgcagcgggataaccttgaggctgaggcagtggctccttgcacagcagctgcacgcgccgtggctccggatctcttcgtctttgcagcgtagcccgagtcggtcagcgccggaggacctcagcagccatgtcgaagccccatagtgaagccgggactgccttcattcagacccagcagctgcacgcagccatggctgacacattcctggagcacatgtgccgcctggacattgattcaccacccatcacagcccggaacactggcatcatctgtaccattggcccagcttcccgatcagtggagacgttgaaggagatgattaagtctggaatgaatgtggctcgtctgaacttctctcatggaactcatgagtaccatgcggagaccatcaagaatgtgcgcacagccacggaaagctttgcttctgaccccatcctctaccggcccgttgctgtggctctagacactaaaggacctgagatccgaactgggctcatcaagggcagcggcactgcagaggtggagctgaagaagggagccactctcaaaatcacgctggataacgcctacatggaaaagtgtgacgagaacatcctgtggctggactacaagaacatctgcaaggtggtggaagtgggcagcaagatctacgtggatgatgggcttatttctctccaggtgaagcagaaaggtgccgacttcctggtgacggaggtggaaaatggtggctccttgggcagcaagaagggtgtgaaccttcctggggctgctgtggacttgcctgctgtgtcggagaaggacatccaggatctgaagtttggggtcgagcaggatgttgatatggtgtttgcgtcattcatccgcaaggcatctgatgtccatgaagttaggaaggtcctgggagagaagggaaagaacatcaagattatcagcaaaatcgagaatcatgagggggttcggaggtttgatgaaatcctggaggccagtgatgggatcatggtggctcgtggtgatctaggcattgagattcctgcagagaaggtcttccttgctcagaagatgatgattggacggtgcaaccgagctgggaagcctgtcatctgtgctactcagatgctggagagcatgatcaagaagccccgccccactcgggctgaaggcagtgatgtggccaatgcagtcctggatggagccgactgcatcatgctgtctggagaaacagccaaaggggactatcctctggaggctgtgcgcatgcagcacctgattgcccgtgaggcagaggctgccatctaccacttgcaattatttgaggaactccgccgcctggcgcccattaccagcgaccccacagaagccaccgccgtgggtgccgtggaggcctccttcaagtgctgcagtggggccataatcgtcctcaccaagtctggcaggtctgctcaccaggtggccagataccgcccacgtgcccccatcattgctgtgacccggaatccccagacagctcgtcaggcccacctgtaccgtggcatcttccctgtgctgtgcaaggacccagtccaggaggcctgggctgaggacgtggacctccgggtgaactttgccatgaatgttggcaaggcccgaggcttcttcaagaagggagatgtggtcattgtgctgaccggatggcgccctggctccggcttcaccaacaccatgcgtgttgttcctgtgccgtgatggaccccagagcccctcctccagcccctgtcccacccccttcccccagcccatccattaggccagcaacgcttgtagaactcactctgggctgtaacgtggcactggtaggttgggacaccagggaagaagatcaacgcctcactgaaacatggctgtgtttgcagcctgctctagtgggacagcccagagcctggctgcccatcatgtggccccacccaatcaagggaagaaggaggaatgctggactggaggcccctggagccagatggcaagagggtgacagcttcctttcctgtgtgtactctgtccagttcctttagaaaaaatggatgcccagaggactcccaaccctggcttggggtcaagaaacagccagcaagagttaggggccttagggcactgggctgttgttccattgaagccgactctggccctggcccttacttgcttctctagctctctaggcctctccagtttgcacctgtccccaccctccactcagctgtcctgcagcaaacactccaccctccaccttccattttcccccactactgcagcacctccaggcctgttgctatagagcctacctgtatgtcaataaacaacagctgaagcaccaaaaaaaaaaaaaaa

SEQ ID NO: 83 - DNA, 141001 bp, Homo sapiens
  source 1..141001: mol_type = genomic DNA
aatttataaaggaaaaaggtttaattgactcacagttcagcatgtctggggaagtgttaggaaacttacaatcatggcagaagagaaagcaaaccatcctttctcacatggtgacaggaagagcaaagcggggtaagccccttacaaaaccaccagatctcatgagaactcactatcacgagaacaccatggaggtaactgcccccatgattcaattacctcccaccaggtccctcccacgacatgtggggattatgcgaactccaactcaagatgagatttgggtggggacacagccaaaccatatcagaagcttaaccttctttggagcatgattattcagttgaacctaagttcagtagtcacccagttatgctgtcttcagctactattttccatatgtttctcaaacatctgatatatcacactggctagtgcactttcttccaccagcataccatctcaatttaccactttaacaattggactgccactttgtgtcagggactatctgtgctccaactactacaagtgataaggtcctcactgacagccagggagcaagtgatccagctctaaaactcaccttatcatctgctttcctagaccactcctaacaaccaactattctgggttgagttctccaagaggcagagagttcaggatacagaatgttgttttgtttttgttgttgttgctgttgttgtttgtgtgtgtgtttgggcttttttgagacggagtctcactctgttgcccaggtagaagtgcagtggcatgatctcagctccctgcaacctccacctcctgggtttaagtgattcccctgcctccacctcctgagtagctgggactacaagtgtgcgccaccacacccagctaatttttgtgtttttagtagaaatggggttttaccatgttggctaggctgctcccaaactcctgacctccagtgatccacctacctctgcctcccaaagtgctgggattacaggcgtgagccaccacacccagcccagaatgtttattagaatgcacaattaataccagaggcagtggggaaggaaggactgagcagaggaggaagttgagttgtgattcaacccaacaactgcctggctggcatggggagctctggagttaaatagggccatcagactttcccagtgtggggccaacatgactgggtctttatacccccacctctgtcagtcactcaacgtggtctccctgcaacaaggtgactcttgcagccgagacaatccctgaagggacagagggctgaagcctgtctgccaacagcactcccagtggctggaacaagtccttccctataggggaatctgggcggcacacctccatctccatgtccatcacatacgatatcacagacatttaaatattttgataactgtacataagagtttcctttataatcttatagatcttattttatgcatttgaaaatattcttctgagacagggcttttatcatattgccatagggtgccacgatataaaaaaggttaaatactctctgattcagaagtatccaatgatgacttctctctcatgcatttaattgaaaatctggtttttctccttctctgctagttctctacctctctccccacctcccacatcatagcctattcacatatgtctgaatctcatgatagacaagttcaggttcttttcccaggttctttttaccacatccccccacccccacataaaaagtatatatggcacagcctaggttccacccaaatcctttctcctcttcttcctgggcccacaactctcctacatacattggtataccttgcgcttagggatggccatgtgactaagttctaacagtggaacatgatcagatgccacttccagcctctaagacagccagtgtgtttcctccataagctccttctcttcctcccaactggagactctaaatgatgaccctgcctcaagcaagcaaacaacaagtccctcaggggtggtgtaggctgcaaatggaaggagcttgagtcccaaaccttccacggagaaggctggctaccaacctggatcactcacccaagactgctcgaagagttggtttgaaccattgtgttttggggtctatttattacaacagtttagcttgctttgtgaatagatttagtggcagagcctccaaattctatagatacattgatctcagtcctaaccgcatctggaacaccattaaataaaggaattgcaaacccagagaaggtaatgaatttgtctaaggtcatacaagatggctaggatcaggacccaactctccagttttctttcttctctgctattctgccttctgtgatcctacataagtgggcatgattgtataacatatgcggccatgagatttctctttcagcaagagaaagggacaggaagaaagagagggaatgcattttcttggcctgaattagtgtgagccattagttacctacattgactaaattatctggaatgaacattcaactctacatcacatatagttaaaatgacagatctgcttaagattgtttctagcatacgttatttcaatttaggcaaatgtgaccattcagtgtgaggggaccatactgtcattaggtccctgtcagttctcaattatactgttatcttagagggggaaaaatgtgaaatttgaatgtagacgagtgttgatttgactgctacagtttattttacgtatagaaataaaataatgtgtagcaaaagcattattacaaagatgataatgaaataactagtatttataatagtataatagtatagtatttataatagtatgatagtttaatgactatttgtcagatgttgtgtaagaaactttatacacacacacacacacacctcatttaattcctgtatcaatcaggatacaggacgctgtggtaacaactcctcaaatctcggtggcttgcacaacaaatgcttatttcttttttttttttgacaccaagtcttgctctgtaacaggctggagtgcaatggtgcaatctcggctcactgcagcctctgcctcctgggttcaagcgattctcctgcctcagtctctcgagtagctgggaacacaggcacgcgccaccacatctggctaatttttgtgattttagtagagatgggatttcaccatgttgctcaggctggccttgaactcctgacctcaagcgatccacccacctcagcctcccaaagtgctgggattacaggcatgagccactgcgcccagccccaaatgtttatttcttgctcatgtgacatgtacttcctcgagtttttccttcctgagatctaagctgaaggaacagctctctggagccacgccattctggtggcggaaaggaagagtaaaagtggtagaaccttgcaatgctcttgaagcgcctatttggaatgtctacatcatgtaaatggtaatggacaagtatgtataatccccacaccaaaaaaaggggacactattggggacaataaccacatttcaatgctgcaagacggatattgactgcacccccttcccactttcagaaagaagaagagtaattttgctgaactccttctagagactggaaatgtcccttccagttggggtgattagggaaggctttggtaaaatttgagctagagtttgaaggttaggtagactactggtgggtgaagaaagaacaaggacctttgtaggcaaaggaaaacctcagaattacagaggtggaaaaagagttctagtcaagccacttcagctggctacagagtaggtgggaaagaaaatgggaggacaagggctcagatgatggggggttggggcattggggggacacttgaaagctaaactaaggggttgaacttaatttaggaggcagttagaagcttttacatatttttgagcaagagagtgacataattaaaatgatctgggccaggtgtggtggctcacacctgtaatcccagcactttgggaggctgaggagcttgggtcacctgaggtcaggagatcgagaccagcctggccaacatggtgaaatcccgtcctactaaaaatacaaaaattagccgggagtggtggcatatgcctgtaatcccagtagctgggaggctgagacaggaaaatcgcttgaacccgggaaacaggttgcagtgagccgagatcgtgccactgcactccagcctgggcaacagagcgagactccatctcaaaaaaacaaaacaaacacacacaaaaaaccaaaaataaataaataaaatgatcacttctgaatactgatctaactaggggttgcagggtgggctgatatagggagaaactggagagcaaggagatcactaaggtccctacatgtccagaaccaagatagaggtcttgaactaggatggtggcagttagaacaacaacaacaaaaagtcaattccaggctgagtgcagtggctcatgcctgtaatcccaacgctttgggaggctgaggtgggagttagaaagcagcctgggcaacactgcaagacctcctctctaaaaaaaaaaaaaaaaaaaagttagccaggtgtggtggtgcccacctgtagtcccagcaactcagaaggctgaggtgggaagattgcttgagccccaggagttcaagcttgccgtgagctacgattgtgccactgcactccagcctgagcaagaccttgtctccaaaaaaaggtcaattccactgacttttctaaggtgtacaccatcaaggggcagctccatctccaggccattggctcatgagacattctgtagtcagaaggctagggcagattgctttgagcaagcccccatggtggttctcactcctacttctttgggtatatgcccctctgtttaaaaataaagttaatatgcatttaaaaaaaaaaaggagaaaaaggtcagttccagaaactgtgtgaataaagcattttacttgctttttctattaatctataacatatgttgattttttaaaaagaatataagagctatgcaaattggagcttcaagacaacttcccatctccctaggaggagatggctgccctaaacccccctacatagaaatcatcccactgcttgggcttaaacttgatgttggggaaatgaaaaatccaagctaaggccgaagcctggggcctgggcgaccagcagaatgaggaccactggtcagtttcaggctgaggtgcgtcttccaggggacaatctctagctggcccttaaacattcagacttcaagctctatttacagcataaaggtgtttcaaaagacgtgatacaaataactgcaaatgctctgcgatgtgttaagcactgtttgaaattcgtctaatttaagatttttttttctgacgtaacggttagattcacgtttctttttttttaagtacagttctactgtattgtaactgagttagcttgctttaagccgatttgttaaggaaaggattcaccttggtcagtaacaaaaaaggtgggaaaaaagcaaggagaaaggaagcagcctgggggaaagagaccttagccaggggggcggtttcgggactacgaagggtcggggcggacggactcgagggccggccacgtggaaggccgctcaggacttctgtaggagaggacaccgccccaggctgactgaaagtaaagggcagcggacccagcggcggagccactggccttgccccgaccccgcatggcccgaaggaggacacccacccccgcaacgacacaaagactccaactacaggaggtggagaaagcgcgtgcgccacggaacgcgcgtgcgcgctgcggtcagcgccgcggcctgaggcgtagcgggagggggaccgcgaaagggcagcgccgagaggaacgagccgggagacgccggacggccgagcggcagggcgctcgcgcgcgcccactagtggccggaggagaaggctcccgcggaggccgcgctgcccgccccctcccctggggaggctcgcgttcccgctgctcgcgcctgcgccgcccgccggcctcaggaacgcgccctcttcgccggcgcgcgccctcgcagtcaccgccacccaccagctccggcaccaacagcagcgccgctgccaccgcccaccttctgccgccgccaccacagccaccttctcctcctccgctgtcctctcccgtcctcgcctctgtcgactatcaggtaagcgccgcggctccgaaatctgcctcgccgtccgcctctgtgcacccctgcgccgccgcccctcgccctccctctccgcagactggggcttcgtgcgccgggcatcggtcggggccaccgcagggcccctccctgcctcccctgctcgggggctggggccagggcggcctggaaagggacctgagcaagggatgcacgcacgcgtgagtgcgcgcgtgtgtgtgtgctggagggtcttcaccaccagattcgcgcagaccccaggtggaggctgtgccggcagggtggggcgcggcggcggtgacttgggggagggggctgcccttcactctcgactgcagccttttgccgcaatgggcgtgtgtgtgtgtgtgtgtgtgtgtgtgtgtgtgtgtgtgtgtggaggggtccgataacgacccccgaaaccgaatctgaaatccgctgtccctgccgctgttcgccatcagctctaagaaagacgtggatcgggttctagaaaagatgactccctgcacgcccctccctgcacctcccgagcagtgattccgacagggccttcactgcccctgattttaggcgggggccggccccctccccttttcctccttcagaaacccgtaggggacatttgggggctgggagaaatcgaggagatggggaggggtccacgcgctgtcactttagttgcccttccccctgcgcacgcctggcacagagacgcgagcagcgccgtgcctgagaacagtgcgcggatcccactgtgcacgctcgcaaaggcagggttcacctggcctggcgatgtggacggactcggcggccgctggtccccgttcgcgggcacgcacagccgcagccacgcacggatgggcgcggggctgcaggtgcatctcggggcggatttctttctcagcgctcggagcgcagggcgcccggcgtgtgcgctccctgccggaggcgcggggctggcgcgcagggctcgcccctcactgcggcagtgggtgtggaccctggtgggcgaggaagggggaggataggctgtgcctcctcccactcccgcccccagcccccctttttttccccctcggaacgcgaggtgccatcttttttcggcgtgtcacgtctttacggtgccatgccaaaccgggtggccgggcttcataggacagggcggggcctggcattaaagggagggggacaatcagcgctgaaatcttggcgttttgctgctgcgggcgtgagcactgggggcgttcgcccagcaccttcttcgggggctctttgctttgtctgtagaggttacgtgatctgcgctcccagccctggtttctggcttttattctgagggtgttcagtcaacctcccccctacgcccatgcgcctctctttcctttttcgctcctcatttccgagcccattgttggatctcgaggcttgctgggttcgatgaactcgagtcaaccccccgacccccggcacgcatggaacgggcgtgaccgcgcgcagcctcgtctcggagtctgccggcgccgggaagcttctgaagggatgggattcgagtctccgtgcgcgctgcgggcggcggcagagggatctcgcccctccctacaccccaagtgtcctgagggccacgccacaccaggttgcccagcgagggacgctggctacccatccggggatgggtggggagccctggcggggcctctccggctttacgccctgttgcttcgcctggccggagaatgtgaggaaggggcataaggttactggtgcttcggccacacccatctttctgagcccactggactgggcgcagaggggggattgccatggaaaccacaggtgtccggagaggggatcttggggctggcctcaccccttccctgcggagattggggaccctggggtagggggagccgcgcccagtcggcctcctggaggacacgggaggaagccccgaacccccgcgcctgaggctgtttctgattggcccctggaggccgcagacacgcagataggcggccctgggtgtatttttattaatattatgtccgtactgattaatattatttatcttaaataaatttcacccgtgtccaagttcaccgcgcccccaaaaccgagtctggggcggcagggggaactcctggccaacgaatccatgcctcgccctcctgtgatgaacctggtacgcacggttttctggttaattctatcgctgaaaactggtgcggggggcgcacttctgagacggaagagcatctaggagctgaatcctccacgcgggtcgcccaggttgatctgaatttctggggaatggcttggctgcccgcccgggaccaggccgaccctccttgacggtggcgtagagggctggagcctgggtactgcgaggctcctcgcatggctgggcccgccgcgaggggttgcagagcggctcagggatcgattcaagcatcgtctctcctccctcgcccccagacagagctgggcgcggggttccccttccagatggagcgagggtctcggggtggccccggaaaaggggagcccgcggccacggctacgtattgccatctcgcgagcagagatgtcacctcctgcctttggaggaaagggagcccggtggggatgagcgcatttagcccaatgctgggaacaaagcgcactccgcgcttctgcgatttcgctccattttgaaatgtgttggcgctttggtggggccgctgcggtgggcaaggccgggggcgctgttaatggaggaacctcagggggacggtccttcgtaggaaactctatcctggctctgcgcgcgctttaaggaaatggcttccctccaggacctcgagggatgcagcttttgcgcggatgacggtggggtgctgaaccagccggtgcgcctctggaaatgtctgggcacggatcctggggccatcgacgactcctccccattcccagcaggcgggagctcttacattccgagcgagtgacccctctcaccctctggcgctcacacacctgtaactccaaacctccgtctcagaatggtccaggctggaagggatgatgggggctccgacagcgactgcctagctcacccctctgcgtgctcaggctccaggctcagcaggaccaatttgagttctatctgatccccctcggccccttaactgacccatcctacaggagacagggaaatgtctttcctaccgcggttgattctggggtgtcattttgtgttttgtgatggctgcttatatttactgtataagcattgtatttactgtataagcattgtattataattactgtataagctgcttatatttactgtataagcatctccaaatcctccctctacgtaaacaaattaatggataaacagataagtgtatcccctgcccccacccctgctacgcaggtccggagtgactcttgaagctcatacattccttggccaagtttgcttctctaacagatgtttatatagcaataacctggcttggctcttgggttcacctttggacgatttggggaaggggcttgttggctttgctgggttttggatgagtgacagtccatgactgttcctgctggaagggcgtgacttttaagtggtttctaatatcaggcattgctcctccgacaggaacaaaagaaatggatactgcccataaattgttagaaaacttagaatcgctttgattgaggaaaggttagatttattccggttggaaaaagtggcctttctattaaacgtgccctttgaccctcatgcccttggaggtcggtgccagcctggagatgggataagattgtggttttccttctgcctttttaacatctgttgttacagtccatttgttgaaaatttaaagaaactgttttattccactttccctcagcatttatgtgtgtggtttcagtagctctgtggctatatgtacgaacacgtgttatttttccaattggacatgtgataattttccaactggaccttgccttctattgatgtatttatttagcatcttccttactccctccttgaaaaagaatcactcaaaaacaaataaaaacagccgtaggggcctaatacagtgctagacatacaagaggtattcggtccataccaaatggattttatccatgaaggataaatggggaaatacagtgggaagcaggtgggaaactgcgtttgactctgctctttcctccaccaccactttcctcatcaccgtgttcagagacccccaaagccccctcacactcccagaaacacccccctggccactcctaacttgccatgcccaggagttaggtgcttccactagtgacatggagctggcgtttggggggcacctcagcaggtgacgggaagagaagaccccagcctcaccagctgggctgcagcagggagaggagtcctcatgttccagcagggactctcagctgttttcctgtaaaaccatggttctcaactgggggccactgagatgtctagagagatgtttttgttttcacaactcggggagggtgctactgacatcttgtgggtagaggccaggaatgctgttaaacatcctacaaggaaggcacaggacagtctcctacatcaaaatatgacccagtcccaatgtcaccactgctggggttgacactggcactgctatcttaattacattcattgagtgtcttttaggaggccctattctaagtgcttgctaagattatctcatttaatcctcacaacacttccgctatgtagcaggtgctgttattatctccgtgatggggaaactgaagcacagagagggttagtaacttgctaaaggtcacagagccagtgggtggtggagctggttgcctgacactagttccctcccctctcagccacatgtgggtttacttggccattgtggactagtctgggaacccagatatgatctataacattgacccagtagaatattgattccaaaaccactgtctcacaaatgaatttttacaagagtctgtaatcggagcatgacccagaataaggttagggagatgtggagttaaagctctcaatttcttatctggccccgacacagagagcaaggcatttcactctacattggtgctctgtttataaaacaaagagcaaatatctcttcctaaggtccttaaacctcttcccccaatccagggtttctggactgctctgccatatgacggggcagctggtttgattgacccagggaaggctggaaatcaagactgggggatcaagacgtagattcagtgtggccaaggtcaagtctctgaggtttagggacatcagatccccagcttaggttctgtacctcggcaaggtgaaagcgttggcgcccactgatgaggcctgctctgagattgtgggtgtgggttgagttgggtgggcataggcaagtcctcttgtaagaatcttttggcaaagatgggcctgggaggcttttctcacttcctggggcccaggctttgcaataagtattccattatactgtggtaccttggggctacctgagaatcctctgtctcgcccctgttgccttgccaaagagtttgctgtccaagaattcctttcctgtctccaggtgccatgctcctgccacctctgccaggttccctgcctgcccagatggctcccaactgagtgtgaggaggaatttgagacaggttttgagctttctgggttctccagttaggaaactttctgtaagcatgcagatagaatgggcttcagcaaaatacaaactcgaacaacttccatgtatagtcccttaattttctttgcttttttcatatttcatcaggctccatgctgagcccaatcagggacccgatagaaatccaaacaccatgtcagcgagtccccaagaaatgcattttgtgccaaggctattcaaggaaggtttgggagcagctcaagggcagacactgttaccctcccccaggtccccagtgcagggcagtgttctgcatgtggaggcagtttggcctaatggttaaggaggtaggctctgatcgggcctcctgggcacaaatcccagctccctgctcactgtgagacctaagccatattgtttagctgcttggagagttttttgtcatccacaacttggagtatgatggtacctgtctcacgggttgccatggggttcacacaagctaacccggtactcactagggccaagcacatagtaactgctcagtaaatggcatcatcggcggtgtcctgtggatgagtgcttgtgattggctgaatgaccagaggggtctaaagatcctggtgatggaatcagttgtacagataaattgttacactgagtagggatcaagataggaaaagtcggcaactacccagctcccctgcaccaaactgggcagaagtggatcctctgaaaattgcacacacccatgtttaaatgtacacacagaactcttgccacaggcaagcggagatttgtcatctgctgtccctgcctcatcttcttcctgaaatccactccatgccaggaataaactgcatgctctccaccagcccaaactgacctgccttcccgccagccatcccgggcagggtgacctggcttagtacatcgggttcagagatctttccagtttactcgttgaataaaaagtgagggctgatcgagaaagtaatggcagtcagggaaggcgaaggaggtaaagaagagattttacaaatgaagtaattcaacagagtgctgacattggtaaactggcaaacagatttcagggtggttggttgagagtagagtagaaaaggattaaataaagcaaacttgtggtgtactgaatcttaggaattccatgtatccaataagtatagtcatttatgaattaataaattcggcctaagaagccttcttatcgcttaaatcaagactaagtaacaatatatcagttttaaaaagtcattatatcagaaaatcatttaaatgatacacatagatttccaagattttactttaaccgaaactatataaatgtgaatttgttcacccatcttttgacacagggctcaggtcttctcttggtgtctggatcagccagttgaaatttcttgtctgttttgcctatgccacattaataatgcactgtctgggtcctccgatttcagtttggattttgggtttacattgtggagtcatctgaatgcagaatccttcagggattttacttttttttttttttttcatggtctttaccatcccatttgatagtaaatattactcacctttatgaagtctttccaaaacattcaactaaattttcttaaaatcattgaatgatttgaagagcttattcctcagcacttttactccatcagcttgcaccttattttttaatctttttttgagacggagtctcgctctatcgcccaggcttaagtgcaatggcgcgatcttggctcactgcgacctccacctcctgggttcaagcaattccgcctcagcctccgccgtagccgggactacaggtacacaccataatgctcggctgatttttgtatttttgtagggatggggtatcgccatgttggccaggctggtcccgaacttctgacccaagtgatccacccacctcggcctcccaaagtgctgggattacaggtgtgagccaccgcgcccggccagcttgcaccttatttaggatatgtgattattatagcaagtctggtgtacatacaagattttgaatgggcacagatgacctttagtaagtgcttggctgtgataagaggcagtcctgactgcagatcaggctgtgtggaccccagccttgcatgtttacagaccttcatgtcttattcttacagggtatcagaagaacacctactggggaaacttataaattagtaaaaggtgggcattctccccgcccatcttctgtctgtctgccaggactagcacagcactttgaagtcattcacatagaatcccaacttaagagggtaaaatcctcctcaacagactgaaaataagtttaaattccctttgctatattaactcccctgaggaaagagtcttagatcaatgtccaacactaaaaacagttttaaatcagcaagtgagaattaaatctgaagcaattgataataatgtttcattcattcctctcctttggccccgtccaccctactgctaaatccaggcatcaaagagaagagggacataattatctctagtcccagctgctggttttccttccagcctatggcccagttttctgttttactgagaaggctggtgatgttatcttgggatctaagtctgcagtttcaccacaaaaagtccagggatgcactttcatgcttgtgtcctcctccctgggatagcaaggatattagaagacccctggctctgtaattgcttgtcatgtgctctacagacgccacagaatgccaagaacgaagtgctgggaaggacaaattcatggaaccgtgggacggtgctcctcccccagcgtaaaggacagctcctcctcctgaattggagccagcgttctaaatcatgtgtcaacagagttgtcctggatcggatccagttctgccattgatttgcaggtcatttcagtggtacctgtttccagttgttcttaattgaacagtggcaccaaactattgtcttgcctcatccccctcccatggcctgtcccccaaaaagagacttcttgggtaattaatcagggcaacatcaggcagtctgggcgcggtggctcacgcctgtaatcccagcactttgggaggccgaggcgggcagatcatgaggttaggagattgagaccatcctggctttgtgaaaccccgtctctactaaaaatacaaaaaattagccgggcgtggtggcgggcgcctgtagtcccagctactcgagaggctgaggcaggggaatggcgtgaacccgggaggtggaggttgcagtgagccgagatcgcaccactgcactctagcctgggcgacagagctagacttcttctcaaaaaaaaaaaaaaaaaggaatctctttggttttatatatattttttttatatatataatatatattaaaatataatatatatatttatataatataatatataaatatattatatattatatattttatatattatatattatatatattatatattatatatttatatatttatatattatatatatttatatattatatatttatatatattatatatttatatataatatatattatatattatatattatatattatatattatatatttatatatattatatattatatatattatatattatatatttatatattatatatttatatatattatatattatatattatatatttatatattatatatttatatattatatatatttatatatattatatattatatattatatatgtatatattatatatgttatatattatatatatttatatatataatatattgtatatattatatatctaatatattatatatattatatatattatatattataatatatattatatattatatattatatatatttttatatatataatatgtataatatataatatatataaaaacatatataatatatattatatattatatatatattatatatattatatatattaaatatattttatatatattatatatatatacacatatatatatataaatgaggccaggctcggtggctcacacttgtaatcccagcactgtgggaggatcacttgaagccaggagtctgagactagcctgggcaacaaaacaagatcctgtctctacaaaaggaaactgtaaaaattagctgggcatgatggcatgtgtctgtagccctagctacttgggaggccgaagcaggaggatcgcttgagcccaggagttcaaggctacagtgagctatgattgtcccatagcactccagcctgggtaacacagcaaggccctgtctctaaactttttttttttaattctatttatatttacatgtatttaaatgtgaatattcactacctatttgttgcatgcctgcattttttatactgggcttgccaaaaacccgaacagctttctactttgacaatgtatcagaatttaaatcagcaatatgttaataagccaagcaaaggttatatatgcaaataaaactgttgtctataacctcctgttacactggggcacagcaaaagtcatggtgtagtcgcatgtgaacctgtccctttcatagctgctcattgccaggaaacatcaggaatagccatttggaagagtcatcagccctcccaccatccgttttctgtcttgtcttttccctatgagcaggggaaattccacgctggccccaatccccagtgcagcggctcagcctctgcctctgctgctggtccccatgaggccagcttagaaacggaggattttgcagaacatccctaaatccgcttgaataatgaagtgatcattcataaactcacctgaaccttattaaaacctatttaatatttttcctggataatcctatagggataacttgcctcctgggcttctctccaccgggttcagttcttcctttagtggtgaagttcctcccttcttagcatctcaactgtgcctgagaaaaggccagtggcggctgcactctgttccctgtggagtgttaataaagactgaataaattgaaataaatccctttcaatgtcattaagtgctataaataatcatgaaccaatgttcgatggctgatgagaaatgcaagaaaaaatttttaatcagtaggattcataagttgacaatctgggccaagttaaaaaaaataaaaataaaaagacttttaaaaagatcttatcgtttgttaccagtaagactgaattccagaagcaagctactccctcatttgtgggcccctgttatcactggctgcttagggttgccaagccctgaattcatttgtcaactaagagatttttggccaagattaagatttcccatgcctccatatttccatctgagaaatggagattatactgtcttccccctcagaatggatgataatgtggtctctcttctgttcgcatagtcatagaactgaaataaaacaacttaagagaattcctttgagcttctcagaagtgctgcagggctgggggatgcctcccaggagccgcagtcaggtgctgatctgaagtctttggtgggctgactttagcctgacctgaaatagtatagctgctgccacctggctcccttagcgtcagtcagacggtgcagctggttcctaggggtgagggctgagccagcagggtccgtgcccaggagggatgcatgggtggccacagcccagcctgcactgatcttgtctgtccccttctttggaaggaaggagccccaaaccagggtgcaagacagtgggtgggggtgccttgagcatgacctcaagtgatttccagcccctgccagtgctgacttctctggggaagggctgggacttccttctgggctcaagtcacgacccttggatggaatttcctgggagcttttctgttttttctggagttttcagttttttcctaaccagacagggacttggtacagaatctcatattctaattatgcctaggagcagcctctccccaccactcacagtgtttagcatgtgacaggaatcgattaaggcatgagtgattaaattaaagccaggcattgacttggatggtgtaatattctgacatctgtttggtgtcaaaggcacggggcaggcgcgttaattgaactgcttgcacctggcatttgaattgagccagagcggggctaaagtcagtttgccttcaccctgtaaatggagggtttctccggagcgtggatggtgggaggtatttcagggtgtatgcataacccccaccctgacaatggcccatctcttctccagcgtggccaggtttgagtgccagtcctgggtgtccagtggccccatagccttgcgttttagtaaaatgctgcccccattaccacctggtctgtgcacttcggtcactggaatttgccatcttccagtcccgaatgtggcaagccatggagccttaagctcttctccctccacatcctggaacagacccgccagtttcttccaggcattgcctcagtttgcccctctgtttccagtcacactctcaccagcgataaaatgattttagaccttatcatctcaccctcggatccttatggaaacaataatgagttgttccctgtttcaattccaaaattcatatccaatccgttttgcatgccattgccaaattcctcccagagcaaccccgtcacctgccctggccctctccaagtgtggtcctgccatgggcatcgcctgctaagccaagctggcctcgagctgcctgcccgggtccccacaccttggctcacctccctgcccagtcccgcctcctgccagcctgccctgtggctccttcatagatgccgtgctctttctgccccttgctcacccatggcagccttgcccctctctccctgccccaccccctatttaaattgacctgaccttcctcagtgtccatcttccccgaagctttccccagccttggcactcaaggtccagaggctacgcgtttcctctcacctgtggcagcgccgtgctccccagtgcctcacagtttccttcttgcccccgcttcctgtgtaggactcatctgcccacaggttgcacgtcctgtgagggcaaggactgtgtcttatgtgactttccttctccagtcacagagctgggcacatagatagctcaaaaccctctttattaacacagttggatgttgagaaatcaaacaggccaatgtcaaatgagctctccttatttaaatcaagtcagttctccacctcctagcactcagttccagtactctatatacatggaaataataaaaaacacatttcctttgaaacattctataatcgttcctttgccctacttcagaccaacttaacgcactccccattggtccaaatgagttttgctatacgaagatgctgataataatagcagcagtggattattctgctaaaaccattgcctcgttaatcctcagtcccgaggtggggattattatcctcattttgcagagaagcaaactgagactcagagatttcacagctggggagggagccagctcatccctctgtccaggcccaagctctctcccgcttgccttcctgcctctgcaacctcagagcatcccccatctggttctactgcctgtgctagtcgtgcaggagccaaaagacacgtctttagtgctaaggactggagaagccatgccctccagcctctgtgaatgggtcatatgtaacatgagcctggagaaattatttgaaaccaaaggcaagcctctaaaccaggctgctgcttcatggcgccggtgacggcagaaccaaatttagtgctgtgggcaggtccacacttatcaaatagagaagctcatttttcttccggctcacatcaagcatgaaaaatgttcacacataccccccacacacacatgctttccggaggggtccatgtggctagaggctggaagatgtggatgagaggagcctggcaggtaagcccagggaagatgacattcagcttcccagacagcatctacagggagaaatttaattaaaagtggggcggtttccctgagcaaggcagacaaagtcagccctctactgttaagaaaaagggtcacagtgagaggggaggtgaggagactgagtctgtattttctagtctgttgggctacactacctgatcccccttcctcaaaaatccactttactttccccatgtctacaccaatgtggttcacactctgggaccaggaaaagggggagtgatggggaacagagaagggaggagctcacacagctgaggctggggttatgcatatcgaattacttagaatttgcaacctcacagggtactttcatggcgttgaaatacacttcccacagccaccctccctctaactaaaagcaagagtcatttctcagttctggtcttgcctcccacgttctcctccacatttaagaaaatccaccagctacaaagtgaagataccatatgtgatatcccaccctagtttctgttttatcagggtttggagcaggtggagcaggcagagggatcatttcagcctataaattgtattaagggtgagtactgagtcattcttcaagaaaagttttagaagcatccaaaactgaagggtggagccacctggagacagtatcatcagtcctggccccgagcatggcctgcataggcccccatggatcccagcgggagctgcagagtgcgggcaccttggcacacagccctgagtgcaaaattaggagctgggcagagggcatctctctgtcgccattgggcagcccagggcacactggtcatagccttagaccacgaacaccctgtgcccgggggacagatgcaaccagtgtgccctgggctgcccaatggcaacagagagatcgacacctggaccccatgtcacggggactccactactaaggctcctaagactgccaccttccagtgggataagccctgcctcctactgggcccacaatgtgcagagaacacttgggactacctggctttctggatacacaaatattgatccaatctggactaattagaaggtcagtcccaataacaaatcgaagtcagctgggcgtgatggctcactcctataatcccagcactttgggaggctgaggtgggcagatcatttgaagccagaagttcaagaccagcctgggcaacatagcaaaaccctgtctctactaaaaatacaaataattaggctgggtgtggtggctcatgcctgtaatcccaacagtttgggaggctgaggcaggtggtcacctgaggtcaggagtttgagaccagcctggccaacagggtgaaaccccgtgtctactaaaaacataaaaattagccaagcatgatggcatgtgcctataatcctggctactagggaggctgagacaggagagaatcgcttgaatccaggaggtggttgcagtgagctgagatggtgccactgcactccagcctggttgacagagcaagactctgtctcaaaaaaaaaaaaaaaaaaaaaaaagccatgcctggtggagcactacgtgtaatctcagctatttgggaggctgaggcacgagaatcacttgaacctgggaggcagtggttgcagtgagctgagatcgcgccactgcactccagcctgggcgacagagtgagtgagactccatttcaaaaaaataataaatctgagtcactttaatattgttatttggatgtcaacctctaggtgtttgagacaggagagtgatatgggggcactggaaacacacaggcacggggtgtcctcacacttgggtagcccacacgatgtgatttcagggtgctgggaggtccccccactccccaaattactaacaagtggatagtactttacagtttatatgatctcatttgattcttaacatgagcctgtgagtgaaaaattccttcccctcttctacagattaggacgttgagattcagggaggttcagagggattcagggaagtcaagtggcacctggagtcccgtggctaatttgaggccggtaggggattcgaacccaggatttgtgcttcttatgcctgggcttctgctccctggggcatggtcttccccctagctttcccattcactgctttagcctaggggtcctaccctttattaaactgccagtgcctcactgcttttctcccccaaagacaaaaaaaaagtgtttttgcttttgttttgtttttcatgggcagagacctggaatttcagcttgagaatttgtgccatatgataaataaatcaacagatggctttttccttaaaaaaaaaaaaaaaaaaaactaagatgtatttgcagtgaggcataatttgtaccaaaaagtgctcaccacactgtagtcatgggggcaggaggcagccgcgggtgaagggagaaatcttggagtccaggcagcccccttctgggctgaactggggagctgggggtgctgccagccctgccaggttctcctaggaggcggcagctcatatggctgtgggaggaggcagagggagcctcatatgcacccacatttccagggatctagaagacagaaggaggaaaaccaccatcatgttaaagcagacagttaggtaacacatcctgtaatacaagttattttttccacatctaaaggctaaaaatagttgttagaatttaaagataattggtaaatgagtttctatccttctagtttcacatcaaatggaatcatgctgccttcacatcactagtgcccgttatttgtgtttaatttccacaatgttgtctaattccactctttgggcttccccagggatccagcctccctcactcgcccatcgcagggagatgctttattcatctttgtgtcttctgtgccgggcatagcgcatggcacagaataagcactcagtaattgattcacgagtgaataaatggatgagtgggtgagttcaatattgactacaaaaaccctaaggccacactggtgagtggctgcgcctgtagtcccagctgctggggaatctgaggcaggaggatctcttgagcccaggagtttgaaactagcctgggcgatatagcgagaacctgtctcaaatgacaaaaacagggccaggtgcagtggctcacgcctggaatcccagcactttaggaggccaagatgggaggatcacttgaggccaggagtccgagaccagcctgggcaacatagggagaccctgtctctacaaaaaattttttaaaaattagctgggcatggcggtgtgcgcttgtagtcccagctactcaggaggctgaggcaggaggatcacttgagcccaggaaattgaggctgcagcgagccatgatggcaccactgcactgcagcctgggcgtcagaacgagacctgctctcaaaaaaacaaacaaacaacaaaaaaaaaggctttcttaaagagacttgagaacagaaaggggaacagatacataacttatatatttatttgttcatctttccaccttcctggagggtggaggggaacaggtctgtatttggagttttgaatgctaaaagtgggaatacatgtactgtttgccatgatctgttcaaaagttaagccaaatgccttagattctcctgaaaactggaatgccactgtaaactataagccccacttcaaagataaaagatcttgatgaacagggctgggtctgtggactgggcctctccccaccacacaaggaagggtggtgccagttgaaggaaaatcacttaaatccttgctgtctcctaataaggtgtggtcccaggtagggctgtcagaattagcaaattaaaacacagggcatctgtgaaaattagaatttcagataacaacaaataattggcataggctgcataatgtccctcaaagatatcaggtcctaatctccagaacctgtaaatgtgatcttatttggaaaaggggtctttgtagatgtggttaaattaaggattttgagatggggggattatcctgtattatctaggtaggtcctaaatgcagtcacactcatccttgtaagaggaaggaagagagagatggaaaacacagaagagaagacaatgtggtgatggaggcagagattggagtgaggtggccacaagccaaggactgctggcagctaccagcagccagaaaagtccaggaaccaattctctcttggagctccagagggagtgtggccctgctgacaccttagcttcaacctagtgatcctgattttggactttggccttcagaagtgtgagggaatgaatatctgttgttttaagccaccaagtttatggtcatttcctacagcagccacaggaatcaaaaacagtaagtatgtcccatgcaatgtttgtgacacacaccaaaaatattacttgttgttcacctgaaattcaaatttaactgggtctcctgtattttatttggccaacctagttcccaggcccaaagaaagaggcttttgaaatttgcaagaaagctggttggagctgtcagaaagtggactttgtaaacacagtaccaccgaaccaatttgaactgtactacctctagacaaaagagagggcagtcagacagttgttcgtgatttcttctttcaacagtcatttgagcacttactacaaaacagaagctatgtgtaagggtggaggcgttagctgttaatcaggacctccaggctaagtttctgtattagtccgttttcacgctgctgataaagacatacccgagactggggaatttacaaaagaaagaggtttaattggacttacagttccaagtggctggggaagcctcacaatcatggcagaaggcaaggaggagcaagccacatcttacatggatggcagcagacagacagggagagagagcttgtgcaggggaactcctctttttaaaaccatcagatctcgttagacttattcactatcaagagaacagcacagaaaagacctgcccccatgattcagttacttcccaccagatccctcccacaacatgtgggaattcaagatgagatttgttaccatatcagttaccaacccttccagataaatcacgtgaaatatcgccattaacagagtgagctcaggtggttcttcagtgcatttctgatacctgaaccttccctgggaatttcacagaccatcaggctctccaccctttgatagcaggatagcagggcccaggttctgcaggaggagatgttaccacaggcctgaaagggagggaggggcagatgctacaggaagatgctggctctggattcgctggaggagctttcaagggaagtagatacacactgtctccatcatttcatgtccatcacactctaaaatgctttggacaagaagcaaatgttaaagacaaatgtggcccattttcctgtacaaagagggctgctcccatgccaggctattggcactggtgggcatgaggcttctctgctgccctggccggggggttctctcactcaccattggctctctgacacctggagagaccaccacccttgggctttcatgatgctcacagaatccacactgttggagctttaaggagcctggatcaactggaacaggcagggagtactaggacagcccagcattgccccaaaatatccaggcctgataaaagagaaaaacaggtagctcacaggaaaaggataaaaaaaggaggagggatttaacatgaaaaggtgcttgatctccctcataataaaaagactgctgattccatccaggcaagtgacagaaaaaaaaaaattaatttaaaaagactgctgataaaaccacagcgagacactgctgctcagggatctgagggtgtgggcagccaggctgccacgcatcatgggtcggagaggaagaccacacccctggagcagagggcggctgatctgtcagatgccctttgacagcacctcagcttccaagaattaaccctttctatgtgagcagaggcatccatggggggacacactggtgaatcatctgttatgtagaagtctggaaaacatcaggatggaactggtgaaataagtgtggcctctgacggaatggagcggtccgtctgcactgctgcgggtgcccctcagatcctgtgggtcagtgagaaaagcagtgaggaacaaggcaggtactgtgtactgtcctctgcgtgcaaggaaggccagcgcatgcaacagagtccacacagacatagcctaactctggaaggaagaatgagaatgcagtttcagtggtggcctctggtggggagaaactgggtgaagggagatgtcatttccatttctctactattaattttgtattaccatgcttaaatgttactttttacctttttttttttttttgagacagggtctctctctgttgcccaggcaggagtgcagtggtacaatcatggttcactgcagcctgaacctcccaggctcaagcaatcctcccacctcagcctcctgagtagctgggactataggcacgcataccaccgtgcccagctattttttttaatcaagatggagtttttctatgttgcccaggctggtctcaagctcctggactcaagcaatcctcctgcctcagcctcccaaagggctgagattaaaacgtgagtcaccctgcccagccaattgctttttaaaaaagattaaatgcatgtatacgctcaggcatcagcacacttggaaaggatgaaaatatccggaagaagggttcttttaaaaggctcctcaagtgatgctggcaggcatgacgaatgtccctggtcacaaaagctctgatctggcctaaccctgtcatgttagagactggagtgcgtgtgtgtgcgcgcaaagtgtggggggatgggggtgagtgtgtgtggtgtgtaagcatgagtgtgtatgtgtgtggtgtgggggtgtgtgctgtgtgagcgtgtgtgagtctgtgtgtgtagtgtgtgtgtgaagtatgtggtgtgtatgtgtgacgtgaggtgtgtgtggtgtgtgagttgtgtatggtgtgtgcatgagcatgtgtgtgggcatgtgatgtgtgtgtggtgtgtaagcatgtgtgagtgtgtatgtttgagcatgtgtggtgtgttgtgatatgtgtgtggtgtgtgagcatgtgtgtgtgatgtgtctgtgtgtggtgtgtgtgagcatgtgtgttgtgtgtgtggtgcatgtgtgtggcgtgtgagcgtgtgtgtgcattgtgtctgtgagcatgtgtgagtgtgtgtgtgttcagcatatataaggcatgtaactgaacacagcactttagagggctctcctggagtcagagggggtgggtaggaggagaagggaggtgggctagtgtgctgaagtatctactccttgtcatagtctgtgacaacccagactagcccatgagccaccctgttccctgcatttccaatgagacctcggtggacatgttccctgaggtgaggctgactgatgtcatttgacgatcttgatgccaaatccttttatatcaaaaacaaccagaacactctcttttctcttagtgctttcacccagatgaccacatttcatcctcccagccactctgggccaggtggcactgctggtttgaaagggaggtctcccctggagtaacttccgtgggcggattcacaccctgcccacagtcctgtcccagtcagcccaccatggtggtctccggttcctccagaattcccgcttttcagctcatccccacattcccggagggactgagagcgcagccccagggccctgctctttgggggccgtctctacacccagagaagcagcaaggcattcctaggtttctctttcagatgcagaacttcagtgttcagagatgttcccactggtcctgagagggctcagttcagctttaatgactgcgctgttgcgtgtgctctgcagagggcgggtggcccagcgtggctgactgcagttttcctgacgtggagcccgagcctgccccgctgtttattaattaaggatcactctgcttgcagaaccctgaactccccagaactgtgaggtgggagaaccccgagaggccacctggccccacttcccacctgctgcccaaaccccctctctgccttcctgacagtcaccccaactcccagtgatccccatcaaccatctgacaaggggactgagagggaagagaaaggaggggcccaaagaggaaggtaaaactgtcgggaacagcccccaaatgtgtgacagccttcagtggagttgcccactttcccttttctcctccctgcaggacctcccttctccccagtcctccccaacttctgaggttacattgagaaaagtctgcagagaggtgccagcatcacaaggtgttaaggaccacgagtttggcattttaacagatgccagagccacttgagaaatgtggtaactaagcccagagaggtacagttaacctccccagagtcacacagcaggttcatggcaaagctggactagcacaggtgtccttcccctgcagatccccttctgtgccccacatcacctccctccagtgtctgggccacctggagatgggccctcagactcacccggccagaggtgccatctcatgggagaggtctggccaggaagcatcgatatttgagatcccaagaaatgaagacttggcctgtcagatgacagacttcggtcatgggaacacgtgatctgttttacacatgcgtcccctcagcagcagctttccagaacattcccactttcttctgtagtgagaagaactctttccctgcagcctcctgcccaactcctccttcagtgtctttgcttcagtgtctttgataaaccattctgctttgcagagtgcgagctctgccttgcagggttcgcatctgcctgtgctgagtaaccaacgctaaggtcgagtggtcggtcacctctcataagagctagggttgtctcatgctgatgactaggacttgccctcaaggagaaaaataaatcaaaacaaaagcaaaaacagcaaacatgcatctcttaaagaaggctctgagtccaggtaaatttccttccactgaagcagccaggctgaattcgaattatctttgcccctgcttaaaaactaatgcaaattttcctagagaatatccactaattcctggagggggcatgggcattcctgatgcccatgagaggaccatttgctcttccctcagtatgctaaataacagaagcgacatttgttgctggaaagtatcagtgaagttaataaggtttttcttgcccagggtgagggaacagttcccaatgacaaatgctgtatgggaaggggctgtagaactgccagcccctttggtccatccgtaaagtgaactctgtggatcctggaggattccagcgtctttttttttttttctttttttttaagacagagccttgctgtcacccaggctggagtgcagtggcacgatctcagttcactgcaacctccgcctcccgggttcaagcgattctcatgtctcggcctcccgagcagcaagactacaggtgcgcaccaccatgcccgactaatttttgtattattagtagagacgggggtttcactctgttggccaggctggtctcaaactcctgacctcaggtgatccacccgcctcagcctcccaaagtgctgggattacaggcatgagccaccatgcccagccagcatctttcatttttctgtctgctttggccctttcctctctcactgtcttccttttccatttccaaagtcagtccatctcactattagcacaaaaactgctagagcgcttgtcattggtcatctctccctgcacctggctggtctgttcttggccactgaagcgtttcccccagctgttgctttaatcattttattgttattatgccttacttaagaaatggatatgagatgcatttacctgtctcttcctgccactctgcagagccagtaagatgtggtggaaagggcccaggctttggaggagggctggctggggttggatcttggctgccccctactagctgtgtgaccttgggtaagtagctggacctctctgagcctggttcggaatcatagcacctctctttcagggctgctgtaaggaatagcagtggtgtgtataaagcagagcgcacagccagcaactggcccctagccacactgctgagcacctactgtgataagctgccattgtggtgtgtgaagcaaaggggaaacatgcctgctgtagtgagcttcctgtagggcaggttgtagaaccagaggtgggttccaaggttacaaagggactcttagtgtattagtctgttctcacattactataaagacctacctgagactggatcatttataaagaaaagaggtttaattggctcacattggctgggtgcggtggctcacgcctgtaatcccagcattttgggaggccaaggccggcggatcacttgaggtcaggaatttgagaccagcctggccaacatggtgaaaccctgtctcttctaaaataaaatacaaaaattagctggccatggtggtgtgcgcctggaatcccagctactcaggaggctgaggtggaagaattgcttgagcccgggaggtggaggttgcagtgagccaagatcgccccactgcactctagcctgggcagcagactgagactctgtctcaataaaaaaaaaaaaaaagaaaagaaaaagaattgcaagaaataaattattgtttatgagctatatggtctgtggtaccttgttgtgggactgggagtcttggcgtctccctgaccctgcctgttgctgcagcaccgctcagccctgcctgctccctacctgcctcccctcggcctctcctgcctccaccgggcccctggtgcctcctctagagacagtcctcctgggaccgattgtgttctcacttacacgaggcatccaggactacagataaccagaggaaggggcgccccccccgcctgccctcctccctggcatcctcacgctgcagaggtcagagcctcatcccagccccttacctgcccctactctgtggagaaccgtggtcagttcgccaggccggatccacgaacggccttgtggaagatggtgagctcacacccagagctggctccgatgaccctgtctcctttacatgtttctaccttcccctccctaccttcccccactgctgggcgcagagtggaggcagatgaggtttaaagctcagaagggcttaaacgggttggggcgcagtggctcatgcctgtaatcccggcactttgggaggccaaggcagaggatcacttgagcccaggagttcgagaccaacctgagcaacatagtgagaccgcgtctctacaaaaaataaaataaataaaattagctttgcagggtggcatgcacctgcagtccctgctactcagaaggctgaggtgggaggatcgcttgtgcccaggagtttgaggctgcagtgagctatgctggcaccacagcactccagcctgagtaacagaatgagatcctgtctcaaaacaaacaaacaaacaaacaaaagaaggcttaaagggggctccaggtgggcttggcagcacaaagctatgaagttctatcttagacacaagttctgttactgggcctttgcaggctggcctgggtacctggctgccatagacagggaaccttccagatgagctgcaggcgtggagcacaggagccagggtgctcttcctgggctctgtccacaggcagaacgtacacagtctttgtacacgtccggcggctctggtgcctatttttgtttgtgtttttcttttgtttggggggatggatttggtttcccccgagccctctgtcctcctgtcacctggctggtgctcggcaatgttgaccagctgcctggctggagttggcagtggctaaggctgtgacagctaacatgttcctgagtcctctcatttcttcaccataatgccctgttgagtttgcagatactgtctctgtttttatctcccggggaaactgaggctcagagtggctaggccaccttcccatggtccctcagctcatgagggccacacagggcattgcggtggccttctcctcagccttgaccctccggccccagcattgctgcctcaaggggtctcctctgctgagccgtgcaccttctgcctggcagctccaactctgtggctgtgttcagtggctcagcactgccccttgaccctccctggccttctgcggatgccagactggagcactctgacaaggtctggggtggttgtatgggtcctgtgacctctatacacctcccagtgcctgggaatcctgcagatacaccctccttagccgtccctaaccatagaggacatttctgaggtccccgagagagtggggcacccctgcaggatccaactgctgggcccaggaaggatagcagcagcatgaggggttccattagccacaaactcacggcatggaaccttcacccacctcgcccctcatctgctgtttagcacctggcacgccgtgtatacttactgattattacattttaatggcaaattatagtggcaaacgtatgcatctttgcacaattgttgtacagcatgatgaacaagtcattaatagtaaagaataaatgtgaaagtgagaaaaatctgactgccaaagtttttactccttccttccctccccagacttttaaatgaaagtttagggataatcccttagttgtcctgctagtaggacttgcaattaaaagaattgggccaagaacacttctacgcttctccttttaggtttgggtgtaaattcggggtatttctcactgatgaaagcctggtgcagggcagaccgtgggaagctttcatttccggaatggaccatcaacatcccttggagaagaattctcttctccagacccagacctggtgtcctggcacccattgggcaagtgggtcctagaagacaaacctggtcagagcctggaggctgcttagcattccccacgcacattagcagctcggagagctcaggaagccgcagcccctccttgcctcaccagcctggatcaggacagcatcccctggaagacacacagggcctggcctctgattacccagcctggagggaaagctcaatcgagcatcatgtcacccggtgcccccatgcagggtggcactggtgagacccccaagccaatgataccacctcacaggagtgcaggcccattgtggccagatcatcttgacttttcaagataaatcagaaatcgtatttccatgagatatccctatttgcaagtgatggtgactaaattagaagtttttgaatattgtaacatgttcgtaggctgtttgtctggtttaaactctatctggaggaattcaagctagacttcaggaataacttcttgaggcaaggattttgagaccttagggaaagaaggacgtcttgggggtattctgactgttgtcctcctggaagggaagaacagagaactagaagactgcccttagcgaagttcaaagcacctaagcccgggaccctcagcaagtgttcttgagtcacagattctccctgaggcgcctctttctggctccatagaatggctgattctgtaactcggtgagtttgctttttttttttcctccatcacccaggctggagtgcagtgaagctggagtgccgtggagcgatcactgcaacctctgtctcccaggttcaagcaattctccttcctcagcctcccaagtagctgggattacaagcatgcagcaccacacctggctaatttttgtgtttttaatagagacggcccgaagtgctaggattacaggcatgagccaccgcggccagccataactctgtgactcttgttacaaaggccttatattttgctctttgagggtggttttggtttgatgcctgttggttgccatcttttaactagggatgttttatcaaaatgcccagccaaagtgtccaaacaaattataccttaaagtttgaaaatgtctggcacttctaattcaatgcctgttgtgccaggcactgggctgctgaggaactgagtcccgtccctgcaggctagctagagaacacacacacacacacacacacacacacacacagagtggtcttacaagtcagttttatattctacctatatgcaataaaggtattattatgttgaggtgccttgatataaaaatttttcttaaaggagaggatgcctaaaacaggcattacctgaaacctcctctctccagcattggttgtcttctgtcatgactcagggttttcactgagaatgggatggaaatgtggtctaaagatagggccaatgttgggactggatcccctctgggaagtcagaccaggctagggcaggtccttgaagccatcaggaaaagcctctggagccagaaacaaaacaaaaaaaaaatggtgttaactaaactcagtctcaaatcctgaataggactcaagtcaagcaaaataattaaaggagttagcaaagggcaagtcagagagaccgagcaacaccaatgtcttccgggagccctgtggcgagtgacagagcctggactctggagtagaactcatcttgtgtcttcttctgccactcgttagctgggtgaccttgagccaagccccttaacctcttggaccctatgttcttatctctaagtaggggctggtaatatcttcccctttgaggaatgccctctaaggggtgttgtgaagattcggtaaggtggcaggggtaggactcctggccagaaacaggcacataataaatgctaagtctctccttctctccacctgctggatgctgtagatactaaggatttcgatgtgaatgagacaaaacccctgccttccaggagcctttgagaatcagagaactagacccatttccagaacaaggggatgcagggtctggataaagttttggggatcaatagagcagagggctcccagaggatcccatagggttgactcctaactcaagggcatgagacaacccccaggaagggcaccctggaaggggtccggctgtccctgatttacttgtgggcactgggggaatgcccggagccatccagccctcagggctctgtgtgattctgggttcctcccataaaagataatcagattctttcacgttaatgtctttctccacctcattgcacatcatgcagctattcattgactcagcaagtatcagctttgcatgcgaccttggcctacccactttagcttttagtaatagctcccttcttgaataatacaaccagtggggaaacagaacctaactcttacctctgggaggcttatttgctttgagaacatatgtcctgcagttttgttcatatggcagtgaagtttcgtgcacacactctagagccaggcagcctgggttcaaagcgcagctctgccaggtcctaactgcatgaatttgggcaagtcgctcaacctctccatgcctgagtttcctcatctgtaagattggagcaatggtaatacctgctttttagggttgagaagagaattaaatgaattaagatgggtaaagtgcttagagtggagctttgcaagtagtaagtgctatgtaagtgttcgatttaaaatgaaagacccttaaatacattctttgttcatttcacaagcccttcatttcacaaccttacatttcacaaccaagctctgtctcccctggaatccagccataactctgctcacaagtgtgagacaggccccagcagagctgcacgaagaggagagaaggcagccccccagactcccaaccccctgtccaagatggcaaaaccagaacacagcctctgtaccaccccagcaggtattcagaatctgcaatctccaaagcccacttcaattgtaaatgtagagccacgtgcgctttaagtcacctgtcactctggaggctcttttgctcagttcctcaccattagcagggatgacagggagtgcaggagtgcggtcgactcccagatattggagagcgctgggctagctgcccattctcccggcctccactcctctttgctgtccagccatcacttgctctttgaaggcaaacaaaacagaaaacagtgccaaaagtatgggaagaaagccagcttctcccctggggtgcctgtgatgccatgcccaccctccctgaccacgcagcccctgtggaccctcagggccccaagcccccatttccatcacatgcgtacacccatgtgtgtccatagccgcccatctcagtcaataaggctgctcctgcccacttggaatagtggtgacaaccaggagtggcttatgggaactatcccaatggcctgacagcatgtccgctgcaaaccgctgaggtaggacactgccctcatgtctagctgatcagcaagaggcgcagttgctttcttaggtaacattgctgctgtgtcctggccattgctggggggtggcacttaatctacaccagaattttccctcctgtatcttccaagctgcttggatcttggtgctgaattaggttggactttgtcttgtggggaagggaggactatagaccctcaacgtaagcaatggtcagactattctaagaaaactcgccgaattaaagcatgaggtaaatttagttctgacttctgtccaccccactgccactgtccccttttatcccatgatcccttgcttttcttttcctcctctctccctatctcttgtgtttgacgcatgataggaattcagaaatatatgtttgtggatttgtttattcacgtagcaaaccatttcttgagtgcctaccatgggccaggtagaatgggcggccccgggctgcagtggtttcttcagcccctctccagggtttacactgtgcaagacggtttgtgatgggtcctcccatcgaggaccacactcttctttctctgtgccccttggtcctcagtctctgaccccacttcaaaggcagcattcactcagggaagctcccatacaatgctagtcagagtaaaagtttggacaaattgccaggaagcagcttgtcagtatgcataaacagcctttaaaatattactactctttgacccagaatttcacttctaggaatctgtcctaaggaagtagtcacatgcaaaagatttatgtaccaagatgttcatcaaagtgttgttttataacaggaagtctcagaagctggataaatatccaacctctggaaatggttagatagaatagtatgtagccattagaaaattatgtctatggggtttaaaatgtcatgggaaaacacttctgacataaaagagcatgagaactgtatatttagcataatcttaactatgttttagaatgcacaggaaaaaaatgtacaaacatattcatagtgatgtctctggtggtaggattatgatcagtaagtacttctgtctcttcatattttcctgtatttgataatacatgcatatgttgtttttaaaataagaaaaattttaagtttaaaattggagctgaaaagtgtttttaggtcaggcgaggtggctcacacctgtaatagcaccactttgggaggctgaggcagtcagatcacttgagcccaggagttcgagaccagcctggccaacatggtgaaaccccatctctactaaaaataaaaaaattagccatgtgtggtggcacacatctgtaatcccagctacttgggaggctgaggcatgagaattgcttgaacccaggaggtggaggttgcagtgagccaagatcgtgccactgcactctagtctgggcaacagagtaagactctatgtcaaagaaaaaaaaaaaagaaaagcctttttaaacagtagcagacataactatataatccttactaagctgtcggtcaaatttttatttatatatttattttattcatttattatttttagacagggtctcactctgttgcccaggctggagtacagtggcgtgatcatggctctcttcaaacttgacctcccgggctcaagtgatcctcccatcttagcctcccaagtagatgggaccacaggtgcataccaccacacctggctaattttttttattttttatttttagagatggtgtttactatgttgcccaggctagtctcaaactcctgggctcaagctatcctcccacctcggcctcccgaagtgctggggttaccagcatgagccactgtacccagccctcaaatttttaaaaatctataagagacattattggacaattagagaaattcacatatggacttataatagtatcagagtgtgtggtgtgatggttctggagggaatggactttttctttggagacaggcttttctatgcccacccttttatcttgctaacttatcatcatccaggttccagcagaaacattacttcccccaggaaatttcttaagggtgcagtatcatgatgtctgcagcaaattctcaaatagctcaggaaaaaagtacgtgtgtggtatgagtgtgtgtatgtatgtgtgtatatatatacacatatatacacatatatatacatatatgtgtatatatatacatatatgtgtatatatatacacacacatacacatatatatacacacacacatacatacatgtatttttatataattatatatgcagagagtgcaaatgttgccaagttaaagattggtgagtctaggtgaagggaatatggtatttattgtattatttgtgcaacttttcttaagtttgaaaattttcaaaacaaaaaattggaggaagaaggcatgccagtctaccccaagccctccattggaatgctgaaaatctaaacaatgtgatttggcaatttcatttcttttctgttgtgggccagtagtccttagatgttggggaagggggtagtcgctgaggtgtggttgacttaggatggaagaagcagaagtcaagactcccagggtcaaagtggtttgctctgctgacccaagtgtgggaggcccagagtcagcgtttcaggtgtgctaattcagcatggttctattcacggccaaagtccaccctgggcacctctctggcagcaatcttgggtgactctactaaggccaggcctccatgaccctatgtctggatcccatatctccacctctcccactgtctcaggaacggtgcttagctttttcttttccctctcctgtcttctttgccagcatgtagaaagtttaaataattcccctctttacaacaaaacaaaacatacccccttcagtcaaccaccctagctctcttctccttttcccagccagatttttttaaaagcatcctaggccaggcgcggtgactcacgcctgtaattccagcactttgggaggccaaggtgggtggatcacaaggtcaggagatcgagaccatcctggctaacatggtgaaaccccatctctactaaaaatacaaaaaagtagccgggagtggtggcaggtgcctgtagtcccagctactcgggaggctgaggcaggagaatggcgtgaacctggtaggcggaggttgcagtgagccgagatggcgccactgcactccagcctgggtgacagagtgagactccgtctcaggaaaaaaaaaaaaaaaaaaaaaaaaagcatcctcagcactttggcaactccatctcctcccaacatgtccctgttactggaatccagccaggactcagccccgatctttctactctaaccagttgtctcagttaacaaggacaggtttatgctgcagtgacaaacaagatcccaaattcttgtggcttcacacatctggcaccacctcatcttccagccttaggagtcatcttttagttccttgaaaactctttacagttttctgttggggccttgtcatatactattcccctggaatgttctttcctatcccctccctttcaccttgctaacttgtgcccatccttcaggtctcagcagaaacatcacttccttggggaagttttctccaacacccacactacacaggtgtcccatctacactcctatgactttgtggtacttgtctcacttcattttccactgccttccccacaaggcacctgcacaagggcaaggaccgtaccactgtacctatgtcactcattgctgtggtcacctgcactctggctgcctaccttaactacacattagaatcacctgaggagcttttaaagccacaatgcaagactccaccctaggccaattggatccaaatccctggggtagggccagacatcagtggagttatatatacatatatatattttgtttgtttgtttgtttgttttttgagacagagttttgctctgtcacccaggctggagtgcagtggcgcgatcttggctcactgcaagctccgcctctcgggttcacaccattctcctgcctcagcctcctgagtggctggaactacaagtgctcgccaccacgcccagctaatttttttgtgtttttagtagagatggggtttcaccgtgttagccaggatggtctcgatctcctgacctcatgatctgcctgcctcatcagcctcccagagtgctgggattacaggcatgagccactgcacccggccatcagtggatatatttttaaagcactgcagagaattctgttgcatcagcttgagaaccactgatctgccttgtgcttcacatttaaaacttttttttaatgaataaataaaccccaaaaaattaatctccctaagcctccctagaagataggatggtaaggatattttcctaggtaaaaatatgttaatttcatatttcatgaaatttcatgtttcatttcaatcaagctctgtcatacaccttacatggggcaagcccagtgcctgggcagggtgtaattatactcattacacaggcaaggaaaagtcacattaggtgatggagcacaaataggcagttaatggtttcagggctagttaggatatgtttgtctttcaattgcaagtaatagaagcccaaagaaattggttatttatataatataattgattggttcccaaatttgaaaaattcaggaatagacccagcttaggtacagctggatccagtcactcaaacaatgtcacaaagaaccctttgacaggaatgtatcctgtgttgactctactttgctctgagtagtctttccccaggtgatgataaaaatggtcatcatcgccaggcttgtgtcctgtttagtaggaatatacaagaagagctcagtaaatgctggccccaccactaagcaaaaacaaaacttttgttgttgttattgttgttttaaataacagcttagacctttcttctttccttgttattctctttcatctgtaatccagttttctacttctgaagtatagaatgttctgatgatttattcttcattacccacaacttgcacatgtttatttaaaaatgccaggattgcctggccgttgtgtgctgttaacctttgtttgctgttagtggatccctgaagttcaggctcccaggggagcagataatgggtatccagttcctgcaatatccaccctctggcaagccaagttccttcctgggtaaggttttgcctacctgcattcctagggaagtttctgggcctgaccaccaagccagctctgagaaggggtgcataagccccaccatgctttggctctgtccctatagaatattttatgttgttactgaaaactaaaggaagatgggtgcggtggctcatgcctgtaatcccagcactttgggaggccaagacagattgatcactcgatgccaggagttcaagaccagcctggccaacatggtgaaaccttgtctctacaaaaacaaaacaaaacaaaaattagccgggtatggtggcatgcacctgtggtaccagctactcaagaggctgaggcacaagaatctcttgaacctgggaggtagaggttgcagtgagccgagatcgcactactgcattccagcctgggtgacagagcaagattctgtctccaaaaaaaaaaaaaaaaagaaaaggaaagctaaaggagagagactaaaatgatatcaggttcctggagaacaaacagacatgattttgcttcatggcaggacagccggaagaagtgggattatatcctcacattacaaataagaaaactgagactcagaatggttaagtcacttgtcccaggccacacagccagtaaattacagaaacagaatttgaacccaaatcttccagctccaaagcttgtgttcttttcactacctcctgcttaattttttaatttctaagattagacccttcatctatccatgacacctgcctgtcatcccctgaaaaaaggtgaacgccgttcagaaatttttctagcctgagctcactcccagttcacttatttttgctttgtcatggctgcccagtccccacttgtagaccaggaataggtcatggctgcggggactacacgctgtcgctgctgcaagggccggcctctgtttccggggctgagtgggggccagacctgccaggagcaccatcttctgtgggtcctgcctggatgtcacatcccggccccaagaagtcactgcaaaccttcgtattattgagcttcacatcctagaatttgctgtcactgtggctgctgcatgaagttgtcctgagagaaacgggcattgtcattaacagggaaattgatggtctgggggaaaagtcatcctcattctcttgcagatctatgggtgattgagactggctgatgttgaaggggtttctcagccatcgtgtgccatgttatggaacagtggtgtagccagccatttgacacccagcgctgacctttgtttaacaacctcacctatatatgacaaaatgattgtcagaaataatcgtgtaatgaaatgactgtaataatggccagaaaagaaacgcagatagtaaaatgtttctcttgttgaactctgtacatataattgcaccaggatttttttcaaataaaaagtaaatattatactacaaaaaagggaaaaagcacaagcatttattaaatagctttctatatctttctgagttttgatcctttgattgcagactgatgtaatattttatgtaaatcattgcttggttactaagtgaactttaagaaaagtgagacgtctgcagaagttgcccataatttagcagctactgtattgtaccattgatgtacggctttattttcttgattaattatttaaacaatataattcacaattttaaaataataaatttccacttaaaatggtatttaaactcagcaaaatatatcatctatgagtaaaatttgtatttaccaagcaaaaatattacagtttgtggttcacatgctgtctcactgttttaaattttaaatacaaaaactccaagtaggctgggtgtggtggctcacacctgtaatcccagtactttgggaggctgaggcaggcatatcgcttgagttcaggagttcaagatttgcctgggcaacatagtgagatcctgtctctactgaaaacaattagctgggtgtggtggcacatgcctgcggtcccagctactcaggaggctgagataggaggatcacttgaaccctgggggacagaggttgcagtgaggcaagattgcaccactgcactccagcctgggtgacagattgagaccctgtctcaaaaaaagaaaaaaaaaaaagaaacacaaaaactccaggtggtcgcacagaatgacaggactgaagtaacttagctccaatttctgtcttcataatcactgtcctaccattgtctgtgcttagaatctacttgcttaatgcaggaacatgtgttctcacagagatggaaaatgcaaatggcgccagaagcaagctggaaattctgaaccattaagaatttactctctgccaggcacggtggctcacgcctgtaatcccaggactttgggaggctgaggcaggcagatcatctgaggtcaggagttcaagaccagcctggccaacatggtgaaacttcatctctacaaaaatacaaaaattagccaggcatgatggtgggtgcctgtaatcccagctactcgggaggctgaggcaggagaatcgcttgcacctgagaggtggaggttgcagtgagccgagatctatctgcaccattgcacttcagcctgggagacagagtaagactccatctcaaaaaaaaaaaaaaaaaaaaagaacttactctcaaaataaatacgtgtggctgactccacatatggtagggccaactgtataactagaagttctccaaataacttctgtggagaaaaaaaagtttattaaaggttaacttttttaaagtgctaactagaaccttactaacactgagatcgcaccaattgtttataacttagacagggccgggtgcagtggctcatgcctataatcccaacactttgggaggccgaggcaggtggatcacttgatgtcaggagttcgagaccagcctaaccaacatgatgaaaccccatctctactaaaaatacaaaaattagccaggcacggtggtacacgcctgtaatcccagctactggggagggtgaggcaggagaatctcttgaacccaggaggcggagattgcagtgggccaagatcgcaccattgcactctagccccagcaacaagagtgaaactctgtttcaaacaaacaaacaaaaaaaaaaacctcttggaccaggaaaatattttttaagggaggagtattttatcactggcattgtttaggattgcaggcacatgatgctaatgaaaagcagactaactattagttggttttattactgtttttgaactctctctctcccttttttttttttttgagacagagtctctctctctgtcacccaggctggaatgcagtgactgcagtctcagctcactacatcctctgcctcctcagttcaagtgattctcgtgcctcagcctcccgagtagctgggattacagggcaccacaccaggctaagtttttgtatttttagtagaggcagggtttcaccatgttgcccaggctggtctcaaactcctggcctcaagcgatctgcccatcttgacctcccaaagtgttgggattacaggcgtgagccaccgtgcctagccctgtttttgaactctctagagacagtccagccccttattacttgtcctgaggcagctgctcccttcacctggccccccgcattgtgttccggacccttgtcctggtggtgctaaagaatatctctgtcgatcctttggggactggggaaactgaggcccagtgccacgcgatgccatttgttcagggaagattaggtcatctgctaggtccccagtcacttgaccttcttcccagacaggaagaagctgctctgggtctctcagtgctccacgtgtctttgcacattgaaatgttttctgattttttttttttttttttgctgttacatttacttttaaaaaataacaagcaataaaatgttacatttgagaaggttgaaatgagaattgatttgagttaaattctagcagatttttcttagaagaatgatatcatcatctccagctacctgcaattgatctactctgaattaagaaagagacttccatttgttgtttatattttgcactcttgatgtgtttctttaaattatggtcatgggccaggtgtaggagctcacacctgtaatcccagcaccttgggactctgaggagggaggatcactggaggccaggagttcaagacctcgtctgtacagtaaattttaaaaattagccaggcatggtagcattcacctgtagtcttagctacttgggaggctgagatgggaggattgcttgagccagaactttgaggctacagtgagttattttcacgccactgccctctagcctggctgacagagcaagacctgcctcaaaaaaataagtaaaaaataaattaaatttcaatcattagcagtcattaggatatttaaatacagtatgttgaatcaaagttacgcatgtgtgtatttttttttccagagagttgtttatcatgtgggttttaatttaactttaaaaaaatgttggctggacagttgcccaaatggtatcatcagccatttggttgagaacgtatgtcctgcgggctcctctgtcactggagttttgctagctgacagccactggctagttagagactgcagtcagcacagatgcaggcgtggacttgcgcacgtaaccatgtcaatgcaaagccatcacttcttaaaaattctgaaccctgctgtctgagatggtggtgcagcggatagaactctgctctaagaggcagtagctaattccatgtcttctttgcccttgactagctgagtgactttgcacatggggcttgcctctctgttgccttgtctgcaaagtggaatcatcttttccttgctagacagaaggtggaccctggacctatggcctttttgagtttcccccccgcttcttagaaggacctctgatcctactgagtttaatacccacgggttaataattgggaaaagcaaaggaagcgcttctgtttaggtaattatatgcatgtttttgtctttttctggctggaaagatatccaagccactgggaaggtccgtggctacccagggtagccctctctggggagggctgctatatccaagagcccctcatgagaatttgaaaatcgaccatggtagggcctgctgacttttgacagctaatggtgtgctgagaattgtccctccaaagatgcctttccattccctcgggagagtctgggcagcccctactgggggctgggatgctggctcttccctcagcctccaccccaactgctctcttccctcctcccctccccagccccctaatttctctcacaaggctttgttctgcagcaacctttcctaatgcagtcctggcctcttcgcagcttcattacataaccttccgtggactcctggtccaaggatcaccccagaaagccagtcagaggtaggcacgcagctggggtccatttacttaccttccccaccccctcggaactcagaggtggtgcaggaatttggactccaagaattaacagctccaccaccatcaccagagccaaaactcaggatgcatgtgcttcatctgctgcttatttccagctgagagccagtggtgccatggttccttagggagccggtcccctgatgccggctcctggccccaaatctctctgatccgggctcttccagaatgtcttgtctccaccatcgcctttgaccaatggtgtccctttgcctggtaatgtcccctttgcctgatgatggccctgtcactcctctctttagcacagaggaggctgtttcatcccttcaagcctgccctcccttcaagtcttagctcaagttcaccttctccgcagagccttctccaatcttcttgactacgtctcctctcagctccagcaacctctgtctctggcactgattccttacttagctaagagaatcacagacacttggggctcaggacaatctgctttctctcttcttacccatggccttggactgtgtgtacctctttgtctccactcccaaacccaacccccagagggcagagagcatgttgtctgtccctttgctcagcatgaagccatgcgtgtggtagatcggcagagttccataacttgtgttgaccgaggggtcactttgctctgaaattacccctgtgtccttcagtatttgcacagatagcttcctggccagaccgaatatatccaagggcatggcccacctctgctcctgtttccaggtccctggtgggggttagttcatgccttcctcataatctgcccactggcctggtcctcaaggtcttcccaactgctcagccagagttgagaaaatgggtcgctccatcctgtttgtgtcgttctctccttcctggcccactctcctgcccacaggtatccaggggctgcctgtagcattagaggacatacatgcacatgcgtgggcatgggacactcacgtagcctccaagcacagcatcaataatgcattctgtgctttatagcatggaaagctgctctaaactttattacacagtggacatgtctgaagcagctcccaaatccacccctgagtgtgttggaattggcaagcctatcacttgggagtctagtttttttgttcgttaataatagatgcttcctgtggccccagcttggcaattttgatttaaagtgatcttaactgaagagactaatggacgggtctgaatttgtgccttttaagcacaaagtattgctcttaattaactggattctatcctttgagcaggcagaggccttcccccaagggcgtcattaacgatccacatctggacatcttccaaagccttcttctgtttcaggccaaccgcaggtgtgttcctgaacacccaggaggctatgagagccacatatgcctcccaaatacacacagtgtgcatgcccagggacatagagcagtgtgcaaagtcccattccatctctctccacctgggagaggatggctcttctgtctgattcatggctcaaagtggtaaaggagctccccactccccgtcccacgcctactcagagtctgcaaatatgtatgcgatatgagagctcgtcagttagctgtcttcagtgtggcgcacatttgaggagtctgactcccctccagcacaggccaatgtgcactgctctcctatctttgtacccccactgttgcactgtgcagaggttggagccatagaagtaccagagctgtgaaaggagaggccccctctcacctctgccctggtctccatccccactttctctaggaagctagtaggtgctgacaggggagagaagggaggggaggggtccagaaacagtggctcatgcctgcaatcctagcactttgggaggctgaggcaggaggatcatttgaggtcaggagtttgagaccagcctgggcaatgtagcaagaccctatctctacaaaaagaaaaaatgtaattagctgggtgtggtggtgggcacctgtagtcctagctacttgggaggatgaggtgggaggattgcttgagcccaagagtttgaggttacagtaagctgtgattgcaccactgcactccagcctgggcaacagagctgagaccctatctcaaaaaaagaaaaaaaaaaagaaaggagagagagagaaagaaaagaaaagaaaaaaaaaaaagaagggaagggaaagcccagaagagtgtggggagaggaggcggccgtcattctggggccctcagtgtgcacaaccagataacacatgctctgtgggcttttgtaccattttgcttgagcataaagaaaggaaggctgcccctaaatagaaagcactctggaggcaaacaaatctgactccaatcctggccctgccactttcccagctgaggacttagacaagcaccctagcctcttggacattctcagagccatctgctgcaagtgggtgctgccatacccaccttactgggcaggcttgggggaccaagggtggtaaatggctcagtctttcatgatgcggccacacagcaggtgcgccatccaggtccatttctttccttcctttcccccaaatcaagttgtcattaaagtactagtccacattaatgaaatcaactgtattaattttctatttgctgctataataaatcatcagaaatttagtggcttaaaccaacacaaatgtattaccttacagttctggaggccagaagccctccataggtgtcactgggctgaaatcaaggttttggcaaggttgcggtcctttctggagggtccaggggagaatccattttcttcctttttccagcttctaaaggtttcatgcattccttggctcatgatcttctatagctatagtcagaaaaattttccatcaatcatcttcaaagccagcaatggcaggatgagtcctcacatcaccttgctctgacaccagttctctgcctccctcttccacatgtcaggaccctcatgattactttgggctcactctgataatctgggatgatctctctattttagagtcagctgactgggaaccttaattccatctacaaccccaattcctctttgccatgtacagtgacatattcacaggttctggggattaggacgagcctgtctctgaaaggctactttacatgaaaattcatttttttaattaagatttttttttcctcttgagacaaggtctcactctatggttcaggctggagtgcagtggtatgatcacagctcactgcagcctcgacgtctctgggctcaggtgatcctcccacctcagcttccctagtagctggaactacaggggtgagcccccatgcccagctaatttttttttttttttttttttgagacagagtctcactcagtcacccaggctggtgtgcagtggtgcaatctcagctcacagcaacctccgcctcctgggttcaagtgattcttgtgcctcagcctcccaaggagctgggactacaggtgtgcaccaccacgcccgactaatttttgtatttttagtaaagatggggtttcaccatgttggccaggctggtctcaaactcctgatctcaagtgatccaccaacctcagcctctcaaagtgctgggattacaggtgtaagccaacatgcccggccccagctaatttttaaatattttttttgtagagatggggttttaccattttgtctaggctggtcttgaactcctgggctcaagcaaacctcccaccttggtctcccaaagtgctgggattacagcatgagccactgcactcggccttaagagaagatttaataattaatactttacaacaagatctggaagaggtgggatgagtaactaaatgaggatacaagtaacccgggtcatatttgctaatacccttggtcacattgaacttgatatcttatcagattttcctaatcagctcctttagcagcagtgttgcagcatcttatctcattttgttttttgtttttttgcctagcacatgcctgtaaatcactggattgaggtgtttagatgtttgttgtcctttggatgcttcttataaatccatatttcatggctccctggaaagtgctatgcaaatgataagctgcaaggatggaaaggaaattgcagtgctcctgaattgtaaatgggcttttacgaggaggtttctaattactcgctctttctcttgaactgaggagttgaagtgtaggtggcagatccataacagataatcatgtgtgtgatgtgacttcagcctgagcgtcgaggaccaagtcacagagcaggaacagccactctccagtgtccttggggctacgtctgaggagaacctgggatttcatatatgacctgcactggctggggggctctcttgacgtaacgtgttccctctgagcatgttacagattctgacattcttatgttccttctgtggagagacatgtacttagtgacctaactcactttagcatatttttgctcatcgtttgtgtagcttaaaggaatcagataattaccccctccccactactttcggaagcacaaatgcaatgccctagaattgtactggggactcaaaaagaaaagagagtagtaaaatctattaaaggggacaaagacagcctatatactacaagctttctatttttatggcagagaatgccattttctaagtaaacagagaactgcatttgacctgcaatatcaaatgcatggatttgatgctttggaaagcaactgttttctgcgttaatctgggtgtcttccgtgaaatgtcctcctgcctttggcttaaacactagctttgtctacagccattccatcctgaacctgcccaatcttgtctgaatcctggtttcaccactgacaagctgtgtgtccttgggcaagttacttcacctgtctgtgcttcagagtcctcatctgtgagttggggaatctggacagaatctaccccatagggcgtagtgaggatgtgttgaattatcccaagtggctacacagagtaagcactcaaatgatgtcatcgttgtcatgattgctgttaccagagcctagagttcattctgatactcgagtctgtggcccatccagcccaggtaaggaatagttggaggagttgggcatgttcagcttgaagaggagacgacaggggatatgggatagttgaatctgtgaagggccccctgggatgaagaactggcatgttctgtgtggctccagggcactgagcaggacccatttgccaaagtctcagggacacagtttctagctatagacagaaaaattttctgtcactcagaggatgaaaatagaatgagcccccttaagaggtaatgagctccctgtcattggaaggattccagaagagctaggtaaccactttaggtgctatcaaggggcttttttctttaaagtcctttccaaaagcttctgagattgcataaacaataggaagccatcttggtgctttaacacaaactctccccagtgatgagggttgagccaaagccagattggcaagcagagaggagacttgtgtacaaggagttcctcgagtcaattgctttttccttgttctagccagccagagggctcctgttggaaaacaggagaccggagaggctgaggcctgaccaaaccagcttctgcaggccagctgggaggccacaactcctacctacgggaaaactgaagggcatctctatttttagattagcaaaagaaaataaatttaagtttgagtctcctttgcaacttttaaaagacatctttattgagatgatcattcacattctataaaattcccccactttgagttacaattcagtggttttagtcttccttgatgattttgatggtcttttcttaaggctcttggaagacccagaagcctctcagacacaggtgggtgtggagggcgtagcacagaggcagacttctcatttcctgggtctcccctttaatgactctcagagacccctccttccccctgcccctggcttctaccccaggggtgtagagttttgccattttccaagcagaacttcatttcctcttctgtgtctacactctttgtgcttctttcttgccagctttttctcctttgcccgcccttccttccttccttccctccctccccccttccctccttccctctttccctccttccccccttccacccttccccccttccccccttccctccttccttccttccttcctgcctgccttccttccttccttccttccttccttccttccttccttccttccttcctggtatgtgactaatttctgtttcaggacataaatgttgtccaggctgttctttggtctttctgttggataatggacatttggcattgagagaggctgctttttctgaaatcatgttcttggggcccagaacctaggtgtgtgcttctgactttgttttcttcctgatccaaattctgatatgtccatttaaattgatctagacccacagggcactgtgggacagatcctcagtggaacatgactctgtaacgagagcattttgttttgtcaaaatgagaacatattattgcctttcatctgattgtaaacataatacatgtttataaaacagtataatgagacaaaaatgtagacactaataagggaaaatctccctaattgtatttctcttcacagagaaagcccctgttgggcatatatactctagtttgtttatttgtttgactacacatatatgtattcttttcttatgtataaaaattctgaacatgcacatttctgcaactactgttttcacttgatgatgcatggacctctctagagtgtacgtttcttcttccttacaaagcagttggcttcgcccagggtgcaccaggacacggttttggctctgtccccagggtgtcacgggaccaggggatgatctcacagggtctgccatctgccctgcctggccggaggctgcatcgagagggccaaggggcaccacgtgtcgtgggtactgtcaaacaagagccttcagagccttccacagtctttcttttgcttcccagcattgcttccccgctggtggactctgaatctagaactagctccaggcgcctctccaaattcagacgggagctggggcactattataatgcaaatctaggcaaagccctcccaataccaggatccagaatggggtggggccctttgccctgaaaagctgtttagtttgaaaatacaaacaggagacagaaaagtttggctaaattaatggataaagttttaacgatggtaaccatagtagggttcatcgacagccagcgatggttctgaacacttgacatgtattaactcacctaatccccacattttacagacaatgcaaaggaggctctgggaggttgagtgacttgccccaaagtcgcacagctcctaagtgaaggattcggagtggactccaggcagcctggtctgactccctgcactgcgctgtgcttatctctggccccaatgccgccatgcagaagtgtctgggggcactttgtctctgtcagacagaattcggagatgtgtatgcttgccctggtatggcacttctctttttttgagacagaatctcactctgtcaccctggctggagtgcagtggcatgatctcagctcactgcaacctccgcctcccaggttcaagcaattcttgtgcctcagcctcccaagtagctgggattatagatgtgcaccatcgtgcctagctaaatttttgtacttttagtaaagatgttgttttgctgtgttggccaagctgatctcgaacttttggcctcaagtgatctgcctacctcagcctcccaaagtgctgggattacaggcatgagccaccatgcctggcagtgtggcacttcttacgtgtgttcagcggacactgtttatcttctgtccctccaagacggtgctgagctcaggtcgttcattactggcagacaactgctgatttccaacagaattgccatcctcttctcccctgcgactttcagagtgtgacctcagactcaaaaattagaagtgaaaacatcttaaaaactatcaccttttcttcctaatcctcctctcccctccctgtcttccttgttgtccccatctaatgaactatcatggcaaaaagagcccatttctggtcattttctgtggcctttcaaactcccacctaccccactgctcctgggtgcattacccgaaagctgagacttcagtgcagaaagtgccaggccctctgtccccccagatcgccttccttgtcttccctgtgcttgcctgtcacattgtgtgggttccagcgctggaaggaatgaggaacagattctctggttctccttttgaagtttaccttcgctccaccacttctgagaccttcccggaagttgccccttgtttctctcctctccagggctgccccagagctgcctctcacctcttcctgctgtcaccccaccaccatcagggcagaagttgggacaaagcctctcctactggctcctgcttttctcccttaggtccagcctcctcttctccatcttcaggagtctccttctccactcacacgtcatgacttcagcacctcgcatcagtccagaatatgactgcttgttcaagtgccacctttctcatgcatttttttctagtgacaatcacagccaccctgtggggcaggagtgtcatcatccccatgtttcaaatgaagaattgcagttcagagagggcaagtgactggcccagcctcaacagctagccagtggaccccaccagggcttctgactccagtccgggttccctttccacccaaatccatggagggagctgagccgagaacaggtgtccttcaggaagacgtgaagccaaagcctccacctccaaactcaggggcccagggagtccaggcacccatccactcacaaggctggatatggtgcattccaggagaggggttgggggcgagtggcctctctgtgtacccgtggggatagatgcgcaagtggcatcgccacatcgtgagtcctggcttcatgggtgagctccaggtccaacgagaagccaagcagggggcccttcaagctcagctttgggcccgggtcggggtacagggtagagcgggcctccccagcccctgccatgaggccaaggcagtgcatcgttcgcagcgtacattcagaaaccaaagcctaggagctggttatcattccggtttacagctgatggaagagcaggtgcttccgagaacccacagtgctctttggccagtgacccaagggtgcctctgagaggcctcgcagcacccggaggtgctgctgaggcaacgccctgactgtaagaaggaccattcatcctcagagagtggccgtgatgctgctgcgacagtcccaccatccctcccgactctcactcccaacagacttcccactgtaaagctgaactctccagcaaatcacctctcgccagactctctcctcactctctctgggtccactagaggttcctcagcctctctttgccttggttttcccagctgtaaaatggagcaaagagggcctatgtacccacaaaggtgtggttggagcgactcctcctacattagggcctcgagtggggcttcatgattggttggtggaggtctccaaacccacccagtgccaccgaaggctgagactgcagatgcaatgccacaggtgtccttcctcagcctgggcagctgaacatcatgtgtaaaacggggataataagataataacagccccttgcacctatgtggctgtgaggattaaacaagataaatgtgtaacagtgcctggctatagaaatatttactcttgttattaagggaagaatatgtgtggctaaaaagggatcgaagatgtaaaagccaatccctccccctctagcatatttaagggtaatgttgagttggtttgtggaccatttgctgcctgttagagctggaaggtagggaccccctctcaacagcgatgctacaaattatacccattggaggtcaaccaaaagacaaagcttattggctggacatggtggctcacacctgtaatcctagcactttgggaggccaaggcaggcggatcacttgagatcaggagttcgagaccagcctggccaacatggtgaaaccccatccctactaaaaatacaaaaattagctgggcgtggtggtgcacacctgtaatcccagctactcaggaggctgaggcaggagaatcactagaacccaggaggtgaaggttgcagtgagccgagatcgcaccactgtactcaaaccgaggcaacagagggagacgcaatctcaaaaaaaaagaaaaaaagacaaagcttgttaataccagcatattgttaagggaataaagtaggctgcagaacaactggtgtaatatggtgccatgtagggaaaattacatgtgtgcataggagaggggtctgcaaggttgtgccctaagatgttagagtggttcctttgcttttctcttttataattttgtatttgacttttaaataaggaccataaatcacttttataaaatacattctctccagcccctactactcctttaaagaataagagtggtttgcccaagaaagacagttttttttgctctggttttcttgattctgacatcagaggaaactgcttctcatccacttggggctctgggttcaggggattcatttcaggcagattaaagtggtgaccaggggcattcgtggacacagggagggacaggagcaccatcagtttgtctcacacaaccactgtcatcctcactgaaggctgttgcctgatcaaaaacagtattgggccaggcacggtggctcacacctgtaataccaccactttgggaggctgaggtgagtggatcacttgaggtcaggagttcgagatcaacctggccaacatggtgaaaccttgtctctactaaaagttcaaaaattagccaggcgtggtgggtgcctgtagtcccagctacttgggaggctgaggcaggagaattgcttgaacccgagaggtagaggttgcagtgagccgagatggcaccaccacactccagcctgggcgaccgagggggactctgtcttaaaaaaaaaaaaaaaaaatatatatatatatatatatatatgtcaaaaatggggtagtttttagatctatagtagttctaaaaacaaaggccatccaagcatgacagatttacaagcactattggctattccagtagttacaatggaggagagaagcttttagttaaaacaaacaaacaacacaacaaacccagaaaccttaggtcaaaaccaaaattgtcctctcagacacaatctgggaattttctcatgacagtgggcattagccaactgacatcagcagcaaccatccgtgtgcacacagtggcaccacctcctcccaaaaagcagccttcatctatgccctcatacaatcgttgattattctctttggattgaggcccggaattatttaagtttcttcttgccagcatgagtctttcctttctgtatgctccttatcttctctctttaatttggcagttctgcttgaaatctgggtctttcattagtagtagttcaatttggttccagaacattctgtggtgtgatgcaatgtgaccagagctcacacttcagagctcttcaagggccagtcttactgagcacctcccagtggctgcctgtgtgctgggcgccacttgtggtgggcaggagagaggaggggacacaaaaggagacacagctccttcttagaagctcaaagttggggaccagctgccacagaagagtatgtttagcatctgagacaccaagatccagcgtcacaagggtgtttattaagcctcctcatctctttctttttctttttttttttttttttcctcaggcagtcttactctgtcacccaggctggagtgcagtggcatgatctcggctcactgcatgcaaccaccacctcccgggtttaagcaattctcctgcctcagcctccccagtagctgggattacaggtgcccaccaccacacccagctaatttttgtgtttttagtagagacagggtttcaccatgttggtcaggctggtctcgaactcctgacctcagatgattcacccacctcggcctcccagtgtgctgggattacaggtgtgagccaccgcgcctggccttgctgttgattcatctatagtatgtttgacttgatgacctccagttaccttagacagaggttctcatctaagctccaactttccatttcctttgtcctcgtctttccccttaacccctccacatttctctcaaaatcaccccacttctaaaaaatactgtttatttttcttttaaatttcaaattatctatactcattgaaataaatcaaaatagcatggaataagcgaaaaaaatggatcccacccttccccactcccattccctagggctaaccatagttaaccatttaatgactaggtttttttgttgttgttattttttatttatttattttgagacagagtcttactctgtcacccaggctggagtgcagtggtgtgatctcggctcactgcaacctctgcctcccaggttcaagcattctcctgcctctgcctcctgagtagctgggattacaggtgcctgccaccacacctggctaatttttgtacttttggtagagacagggtttctcaatgttagccaggctggtctcgaactcctggcctcaagtgatctgcccaccttggccttccaaaatactgggattaaggtatgagccaccgcacccagccctcctgggctcttttcctttagttgcactcgctccccgctcctggagtagagggatttccgagagactgtgggctccagccttcacctaggcccaggactaggatgcctgccctaacatttatctttataccttaaagcaaaacagctggaccataagcattcaagaacaaactgtgaataaggagaaagttctcccaggaaacaagagctttagttctgttgggccagcccttatattccttagctgttaccagtcactgcttgatttaatctcggctatcacttggcctgacaggtctgctgctggtgccaggatgtctgggttttgaagcctggctccattacatacttcctgtgtgaccttgggcaacttactcaacctgtctgttcctcagtttccccagctgtattatgtcagcataatagtttgttgtgtgaattaaatgaggtaataactggaaatgcttcaaacatggttcctatcatgagaaatcctgctttccgcctaaatgtgctggaaaattcctggtggtgcagaacaggagaccagagcaaaggaaagacagggtgcagaagccaaaaattaccttggagaacaaagcgcatgttaaggttatttttggattctaggtttatctctgcttggtcttcagttacctgcaagagatccatttaggggatttttgtttgtttttaacgatagctttattgagatataattcatatgccataaaagtcactcttttaaaatgtttccggtatattcacaaggctgtgcagccttccctgtccttgattccagtctgagtttttaactgaagggataaggaggaccacgctttccccagaccagaaccgcgggccagggggcgattctgctgagtcaccgcgggcgcctggtgcgcggcggcggagcccgggaccttccttggctgccccctagcgagggccgcagcgcagcctgagacacccgccggggccgctccacggccgtcggatttagactggaagctcggtccaggtccccagcttgatgcgcccgcggtgtaggagaccagcccgactcgggcttcccctgagcccctggactcttgactccagcagggcctgggtaatgaacgtcagctcccctttcccaaaggggttgctctgttgggaaggcacccgtttgatacagtagcatagagatgggttttagcatcaaaatatcagaattcaagccttgctctctgcttactagctgtgtgaccctaaaaaggtttctgaacgtctctgagcttcagtttcctcatcattccttctcacggggtggttgtgagcattacagagatcctctctgtgaagcccctgtgagtggctcatcctgagggctgaaataaacatgttattaataatccaaaactggcaagggatgttgactggtccccctcccttgcccaaggagctttctagaacctgagttatcattaccaaactgtactgccttgagtaagaaagttagaaggaatgggaaggatggtggcaggtggaggaaggcggattggtcatcacctccttgcagcaagaaacagccccagatcgtgggaaacctacagacctgctagacagactaggagcaaaagctggggctttaagaatccccagggaggttctcctgagagagtagccagttggattttgtaagcagagatttgtttggggaggaggtgacaacgtagggagcagaggggcaaagctgtcgggaatcctgccttgagggcagggatgtgtgttggggggagttgggtcactggggctcggtggccttgggcaagtttctacctctcaggtcctttacccacctagggtcgccatcctgcccacctcacaggttacagtgagcctggatgcactgtcatgggcaggtgcccaggaaaatggcagacatgttccaaacagcacgcagcattccccagtgatgcccagggtcaccttggaggtgggcgagatgcctggggtttctcgtccaccccacaacacctcaggggacagccaaagctgtcccttcaggtaagctgcacagaagatgtgaactctgctgcaaagactctattctttgggagcaaaagggacccagggtctcacctgcacatccctgtccctgagggcctaggggttcttggaggccccagccttggcaaaatgaggaagaaggtgaaggttgtctgggcccctgccaggctccttcctcggccacgcactccccttcctgcacacacacccttctccctccaccccatctccattgttgtcagaaaagtcacaataaaaaggtccatattgtctagttcccatacttttaatttttaaaattttatttatttatttatttatgtattttttgagacagagtcttaacccaggctggagttcagtggcatgatctaggctcactgcaacctctccctcctgggttcaagtgattctcatgcctcagcctcccgagtagctgagattacagatatgtgccactatgcccagctaatttttgtatttttagtagagacggggtttcaccatgttggccaggctggtctcgaactcctggcctcaagtgatctgcctgcctgagcctccggaagtgctgggatttcaggtgtgagccaccgcactcggctccacacttttcacttattaaaagactgtggtgtccatcaatggatgaatgaataaaccaatgtggactatccctcccattacccaaggaatgaagcacggagccgtgccaagatctggattcacagtgaaagaagccagtcaccaaaagccacgtgctgtgtgacttcccttatacgaaatatccagaagagatacatccatggtgacagaaagtagatgagcagctggggactggcgaaggggagaagggggagcagctgtctatgaggtccagcctttcttctgggtttggtgagaatgttttggaactagatagaggtgatagttgtacaacattgtgaatgtactaaatgccactgaatcattcattttaaatcgttctttacgttgcatgaattttaagtcaatcaaaaacagttgtttgaaaagagaaaagcctatgggtagcggcagcagtgattggatttatgattcgattccatggctcatccctcccctgcctcaccccctcgccctccgacgtcttcttcttttactctgaactgttatctttgttctcatctctctctctctctctcaaccctgcagacacttttccctttctttgtctgcccccaccctccagatttccgtgtctccagtgtctccctacgaggcatgaattgagactgggagggtgtgattctgaagaaggcaccaacagtgactcagctagccccttcccccaccccgccccccgggcctcaatttagctaaaaaaccacagggacggactcaggaggcaatacctttccaagggtccctaaaaaatgtcccattttagtgtccaggtttcactcaactttagtgcctcccctaaaatgtgttccttacctcccaccccactgcatctaagtcactgcctgagaaaacaggattgaggaaaggagaaaggaagagagagagagaggaggagagagagagagagggaggaaggctgatggatttagaaaagaagaaaacaagtggtctgaggaaaacagccttggtgtgtttattttcctgtctgtgtatcgcttctcggccttttggctaagatcaagtgtattttcctgtctgtgtgtctcgcttagattacagggatctgtgggtgatgacacgtctggtccaggctgcgtagtcacctcaagggcatgcttattgatgtgtttttcaattcactatctttgcatgggagtcccaggccaagaggcacagctgcgccatttgtctgttggtttagatatcctttatccagttcttccagagaaatcatcctgcccttctggaggaggtgggcagcaggggtcagagatgggagggaaaggaaggagccaggtccttggctaggatgccagggtcccctgcctctcacctggcctgggctggaggcctcctgctgtcctgtcactgatcactaccccgccccagcctcctgagttagaagacacaggctaaagtagagtatttcttcattgaaaaacccatacaaaataaaggttcataaaaaataaaaatttagactgggtgctgtggctcacacctgtgatcccagcactttgggaggccaaggcaggtggatcgcttgagccctggggttcatgaccagcctgggcaacatagtgaaaccccatctctacaaaaaatacaaaaaattagccaggcatggtggtgcatacctgtggtcccagcttctcagcctatggacccacatagaatacaatgtcagcataagaagggagccctggggtcaccaaatggtttgggcggcaaagaacctgaaggttgagagaagtggcttggttacccagctgttggatgtgagacctggccactgcttcttccataccctagacctgcaccctgacatctcaagtaaaaagttgggggatgttttatggtccaggatgaaggaagggcagtgaggggcagcggagcatcactttgcatttctgtctgcctcttactggctgtgtgacctggggcaggtaacttcccagactcctgggaatcataacacctatgatgatgatgatgatgatgatgatgatgacacctacctcaaggattgccctgaagggtcacagagatgcctgcaaggcacctgcatggagcaagcgccccttctctggcaggtgctgggtgagcactacctgctgccaggccctggggctatggcactgcgtgaccctgcaagtcctacctggcgaagctgtcgttcttgtgctcagtcagtgttggttgtaagactgagaagagtcacttcattttgctctccagggacatctttctgggtcctattttctgcctatgtcaagtagcgcctcaaggatgctcctgaaaatgggcttgtctttcttaacatggcaggtaggtcccaaagcattagcatggggcagctgacctagcccagccaatgcagtgcagtgactcttgcaaccgagtctaatcagaaggtccatgaacctacgagcatttcctgtcccaggatcagggtggaggctgagcctccctgcttagagattcttcccatgcattccacttttttccccaaaagaaaatattgacccttgagaggcacacagtttatttattttgcatagtaaatagtagcctgtattttaaggatgagttgatttctgcatcagcccctgtaggtcatcagccttctattggtgcatctgactctctctagccctgcagggatggtggagggggaggggaaggagggatctttattggaaaccaggacagtgagactcattgccctgtcatctgctctgtggtgctgaatgaggcagcccaacagagaaataccctgagcgagcatccccagcctccaaaacagtggcgcattgccctgagtcctgggaatgacctttgattctcctgctcctgacttggaacccatggaaacctctagaagcagctgaggaaaacccaacatgaaaagcagaactccacactgagaatataggaggtgatcggaacatacaatgattcttgctaagaccgattcacagtttttcttttttttcgatcgaagaaatactggagaagcctaaagaaggagtctaaaaactctggcacgtgggccaaaactgtccttgagctaagaatgattttcacatttttaagtggttgaaaaatgaaataaaataagatgatgttttgtgacacatgaaagctatgggaaattcaaattctaatatctataaatagtgttttatcagaacacagtcatgctcatttatttatgctcgatggctgctttcccgctacaattacgttgagcagttacaacagagaccacgtggcccacaaagccttacaatatttactatctggccctttccagaaaaaaatgtgccgactcttgaccttaacctcagcaatttgggaggccgaggcaggcggatcgcttgagctctggagttcatgaccagcctgggcaacatagtaagactccatctctacaaaaaatacaaaacattagccaggcatggtggtgcacacctgtggtcctagccactcgggagactgaggtgggaggatcgcctgagcccaggaagtcgaggctgcagtgagctgtgatggcaccactgcacctcagcctgggcgacagagcaagaccttgtctccaaataaataaataatgcaaagtaaaataaataaaaccatataaaaaggaatcaatttaaaattataatgaaagctggccgggcatggtggctcacgcctgtaatcccagcactttgggaggctgaggtgggtggatcacgaggccaggagatcgagaccatcttggctaacacggtgaaaccccgtctctactaaaaatacaaaaaaaaaattagccgggcacagtggcgggcgcctgtagtcccagctactcgggaggctgaggcaggagaatgtcttgaacccgggaggtggagcttgcagtgagccgagatcgtgccacttgcagtccagcctgggcgaaagagcgagactccgtctcaaaaacaaaaacaaaaacaaaaacaaaaaaaaattataatgaaagccaaggggcatagtagaacaaattttctagagctcattaagtcaaatgagtcaccagttagtaaaacgcagtcacggggaagagagggcaggattctttgaagcagcggctctcctaaaaacaacccacccttgtccagctgccttccctcctgagggtgttccctttgactgtgtgacccccatcccctatttcccaaccgtccaagcccacctctagcataatacgagcttttaatccctctccctgaccccaacccgattttgaagcccagtctagtattttctcaaatacacttcttggctccattccttcctttccatcacctctgccttttcactgcatgcttggaccactgcagtcagctccctatgaacagttgctctctacccatccaatcggccccgcctgctgctgccaaattcaccgagggcacctctgtggtgctgcctgtggacaaagtccaagccagccacctcacccacctacaggtgagtggggagcagccagcgtgtccagtggtttaccccatcgccacagacttggtgatgtgtcgatgtgcagagaaggggtgttggcagccacaacacaagcaaccccgccccatgtgagatctaagatgggcgtgctgggagccacctctgagaatccaacagaaggcagaggggagaacggctcacacggcacaaacactccttccttttttttttttctttttcctttttgaaaggagtctcactctattgcccaggcaggagtgcagtggtgcaatctcagctcactgcaacctccgcctcctaggttcaagcgattctccagcctcagcttcccaagtagctgggattacaggtacactccaccatgcccggctaatttttgtgtttttagtagagacggggtttccctatgttggccaggctggtcttgagctcctgacctcaggtgatctgcctgccttggcctcccaaagtgctgggattacaggtgtgagccatggggcctagcctccttccatttaaatgtatgcctaatttgcccattgagaacggctgagacgcattttaagtggccagggtctacttagagttagtgctcatgaccaggcccaggtcaagcctggctggccagatggtgcctttgacctgctctgtctctgtgcaaaggaatgagctgaaggatgggggtgcagtgtgtgggcagtgggctggggctggcaggactcagtgactaagggaagagaactttcctcactaccagcctgtcttttcagggcaccgcggggggctttgggacttggtgatgaacacagcacagagagctgtccagcatgcgggtccctggcttctcacacttcccaggctccttcagaggctctctccaaagggagctgctctctctagaacccatgaatttggaatataggcaaccactgcattggggaccactgacctcaaacatagagaccagagcaaatggggctcatcacgtgaaactcatctggaactctagcaggttcttttatatatatatatatatatatatatatatatatatatatatatatatatatattttttattattatactttaagttctagggtacatgtgcacaacatgcaggtttgttacatatgtatacatgtgccatgttggtgtgctgcacccattaattcatcatttacattaggtatatctcctaatgctatccctccccactccccccaccccacaacaggccccagtgtgtgatgttccccttcctgtgtccaagtgttctcattgttcaattcccacctacgagtgagaacatgctgtgtttggtttttttgtccttgcgatagtttgctgagaatgatggtttccagcttcatccatgtccctacaaaggacatgaactcatcattttttatggctgcatagtattccatggtgtatatgtgccacattttcttaatccagtctatcattgttggacatttgggttggttccaagtctttgctattgtgaatagtgccgcaataaacatacgtgtgcatgtgtctttataacagcatgatttatattcctttggttatatacccagtaatgagatggctgggtcaaatggtatttctagttctagatccctgaggaatcgccacactgtcttccacaatggttgaactagtttacagtcctaccaacagtgtaaaagtgttcctatttctccacatcctctccagcagctgttgtttcctgactttttaatgatcgccattctaactggtgtgagatgttatctcatggtggttttgatttgcatttctctgatggccagtgatgatgagcattttttcacgtgtctgttggcgaactctagcagcttcttttcacaagttcatggagagaggtttcccactgagggaatcacatctgtctgatcaaaagaggcttgggaaatggctctcctgttcattccctgaaaacctctgatggaaccactgccactgtggcagccccagcactggcaccccagccatgattggtgccccagccacatctctgctgtgagccccagagccctggttaattaatcatccacgtgttgatggggagaggcccattcacaaaagcgacataaagcccagggagacgtggccgtggcaagaagggtgtgggactacattccgcccccaactgagagattcagaaaccagaaaaaaatggaaaaacatactgtgctcttgggtgggaaaactaaatatcatgaagggagcaatttttatagttttggcctataatacaattccagccgaaatcccagtggaactttgagaatttgcaggaaaaaaaaaaatgtctaaagtacatctggaagacaaacttacaagaaggtcaaataattttgaaaaagaaaatgatatctaagcccacctagagaataagacttgagatccaaagctaaatcaggaggctctagcaaaattgacagataagcaggacagagtgcatggtgcattcacctggggaagagggcagattggtctacaaataggcctgggtccactgactttagctgttatatttggggagaaacttttcaacctcactccatcttaaacctaaaaatattccagatgaattaataaatataaaaaattagaccactaaaaatgtagaagaaaatggatgatctttctataccatagagcaatggaataaatcacaaaggaaaacagatttgactatataaaacttaaaccctgcccatcaaaaaccatcagaaaccaaaataaaaggcaaccaactggagaagatagttgccacaaatatgatcaagggttaatgttattcataaattaagagcccacacaagtcattagaataagcactgagacctgaacagacaagcaaaaagaatgagagtgggtcggcgcggcggctcatgcctgtaatcccagcactttggaaggctgaagcaggcggatcacttgatcccaggagttccaacaccagcctgagcaacatggtgaaaccctgcctctacaaaagtcataaatattagccgggtgtgatggcacacgcctgtagtcccagctactcaggaggctgaggtgggtggatcacttgagcccgggaggtagagtctgcagtgagccaagatcacaccgctgcactccagctggagcaacagagtgagaccctgacttaaaagaaaaaaaaaaaaaaagaggagaaaaatgctgatctcactagtaattaaaacatcaggccaggcgcagtggctcacacctttaatcccagcactctgggaggctgaggcaggcagatcacttgagatcaggagttctagaccagcttggccaacatggtgaaatcccgtctctacaaaaaatacaaaaattcgccaagcgtggtggcacatgcctgtgatcccagctactcgggaggctgagacaggagaattgcttgaacacgggaggcagaggttgcagtaagctgagatcgtaccattccagtccagcctgggctacagagcgagactctgtcccagaaaaaattaaaacatcacatatttaaacaactctaggatatcatttaaaaaaacattaatagactgttttttagagcacttttaggttcacagtgaaactgagtggaaggtacagagacttcccgtatgttccctgccctccacgtacagcctcccccactgccaacgtcctgcaccagagtggtacacttgttacaaccaatgaatcctcattaacatatcattatcacccaagttcatagtttacattagtaaaacatcatctttcatctataagcacaaaaattttttggcatttatttaggtgtatgattaactcagtgttgacaagactcacacttcatacccacttgcactgcatctgagaagcaattggtgtctacagccgctacaccctcaacaagcccgatcttgtttgaaaagcaattggtgatgcttctcaaaattctatggacaaagtcagccgggcatggtggctcatgcctgtaatccctaaactttgggaggccgaggcaggcagatcacctgaggtctggtgaaaccctgtctctactaaaaatgcaaaaattacccaggcatggtggctggggcctgtaatcccagctactcgggaggctgaggcaggagaatcgcttgaagcaaggaggcggaggtttcagtgagccaagattgcaccactgcactccagcctgggtgacaagagtgaaactccatctaaaaaaaaaaaattatggacaaagtttttcaaaaagatatttaatgcaactttatttgtaatattggaacatctgaggccatttcagtgctaactattaggggatggttaggaaaatatggtacatatgtggaaaggaacatttggtagttagtgcccctgatgtttacaaaggcttttagtgaccaacaaatgctcatgctataatcttatgtgaaaaaagcaagtagcataattgcaactatatttttaatgcatagaataaaaggctagaaggaaatatcacagatccttgacatacattcccaaacctttgtaaatccgcggattcatgaaaacagacacatttgcacaagtgcctgatcttttctgttatacattcattagaagtcaagccctggtgccacaaagtatctgccttttcaaatgtgatcagaatgttctcttttgcttcaaggccatttttcacgaagcagtggcatttttgcctcttcatcagagtcaccgtgtgccctggaggactgagaacagcagagccgttttaggatgggacagggcagccaggaggattgggctcactccctactgagtgcctcactcccgtacagcccccatagaggaagaggggttcaaatttattcctcagccagatggcatgtgccgcctgtcctggaatttcacatcacttatgatggaccaaaattccaaaagctgaatccatgattgtcaaagtctggtatggcaggatgtcaacagtaatcgtttctgggcagagggatgattttctcttcccatcttgctttgtataaatacattttctataataaggttgtattacttttctcatcaagaaatagcaaagtactgttttactcaaaatatgaatagagccaggcatggtggcagcttatgcctgtaatcccaacactttgagaggcggatatgggaggatcactttagcccaggagtttgagaccagcctgggcaacatagtgagacccccgtccccactcccccaaagaaaacccacaaagcatttatcctggattattcacaggggccaaaaaaaaaaaaaaaaattcaggcctcctatagccatgagctacgaatatgaaaatatgcaaatgtgtaagaaaagccagcacatccgatttttacttttactttcacacctctgtccaccatgttccaagagaagaaacttggtcattgaaaggaatagatcaaatccaaagaacaaaaccactgtgctcattaaacttcttagtgttcacaaagctttagctgcaggttgaatggggcaacccgaattggctggctcacctgggctgcagggagcagagatcgcgacactgcactccagcctgggcaacaaagcgagactctatctcaaaaaaaaaaaagttcataaattcaaagttatgaattatttttaaaataataataatttacaataaagatgaggacaaagtgtgagtaaatggtggtttctatccagctctgttgagctgaagtggcatctccctgctggggcttttggggaagaagggtgtgtgttgctcttcagatcccaagcctcatgcccctactgggccctgtggggtgcttctcagcccaccaggagagccaccgttggaacacacacgtgggggacctggtgggtgccggtgtggtgaatgggggccacagcctgactccaggaagccagcaaactcggagctggaggagtcaggacacccccgatgagtcaagagttggttttgctgccagttgacatctgattgaaccatctcttcacttctccgtgcctcactttccttaccagacaggctctgctgatgctgtccctctcctgttcagtcgtgccctcaccgttaaagagaaagagcaaactgctgggcagcagcattgatttttttaatgaagtggaaagagagctgggaataacaagtcgggcccacctcacctgcctcacctggtgggtttatttgttttgtttttttttttttgttttgagacagagtttcaccctgtcacccaggctggagtgcagtggtgtaatctcagctcactgcaacctccacctgccaggttcaattgattctcctgcctcagcctccccagtagctgggattacaggcacctgccacatgcctggctaattattgtatttttagtagagatggggttttaccatgttggccaggctggtctcgatcccctgacctcaggtgatccacccacctcggcctcccaaagtgctgagatcacaggcgtgagccaccatgcctggccgtcacctggtggtgttgaatatgaactgctgcggtgttggtaaattaagcaagcagatagatgtaaataacgcttgggcaggaatatggagcacgggatgaggatgggcggccaactgttagagagggtagcagggaggctgagatctgcctgccatgaactgggaggagaggctcctctctctcttcacccccactctgccccccaacactcctcagaacttatcctctcctcttctttccccaggtgaactttgaaccaggatggctgagccccgccaggagttcgaagtgatggaagatcacgctgggacgtacgggttgggggacaggaaagatcaggggggctacaccatgcaccaagaccaagagggtgacacggacgctggcctgaaaggttagtggacagccatgcacagcaggcccagatcactgcaagccaaggggtggcgggaacagtttgcatccagaattgcaaagaaattttaaatacattattgtcttagactgtcagtaaagtaaagcctcattaatttgagtgggccaagataactcaagcagtgagataatggccagacacggtggctcacgcctgtaatcccagcactttggaaggcccaggcaggaggatcccttgaggccaggaatttgagaccggcctgggcaacatagcaagaccccgtctctaaaataatttaaaaattagccaggtgttgtggtgcatgtctatagtcctagctactcaggatgctgaggcagaaggatcacttgagcccaggagttcaaggttgcagtaagctgtgattataaaactgcactccagcctgagcaacagagcaagaccctgtcaaaaaaaaaagaaaagaaaaaagaaagaaagaaatttaccttgagttacccacatgagtgaatgtagggacagagattttagggccttaacaatctctcaaatacagggtactttttgaggcattagccacacctgttagcttataaatcagtggtattgattagcatgtaaaatatgtgactttaaacattgctttttatctcttacttagatcaggcctgagtggcctctctttagcaagagttggttagccctgggattcttactgtagccacattaataaacaacatcgacttctaaacattctataataccatcttttggccaaattgacttcgcctcttcctctctctttccaaatgaaatgtgtttcatttcactgtcagaccacatggttggggaccccacagagcacacagccctccctctgccttcccatgctggcccttcacccactgctggagtgccaggttggtccaagggttggaccaagttgtctgaggttgtctcaaggttggtcgaggctgtctccgcgctgggttgtgctacaaggagcccttctttccatgggtgtggctggcagtgagtgctcacagcaacagcccacagtgcagcccgagggcaggatggactcagtccctgcctccatacccatttctaaggaggcaaaatggcaaacactctacttttctcttttaatgctaaaaataagaaaacaccttgcagcccagggtatgggtagtgcatggaagccgtggagttgtgaggtgggaagtgacctctgctggatatgtctattcaggaagattgctggagtgggtggggtctctgggaggtcccctgagtgtgggaagctgggaccaccagctttctcgcacagggagtggccatcccagcttggagaggttccaggactggttgggaggcacgtttcagatttctatctgttgaatcagcgaagatattggattatgaggaatttgggaattaggaaagtgggtgcaggtgggttgggggtaggtgaaggaagacatgggcgtattgggggagcaggggctgctcagaggtgttccagaagctctgggtgaggaggtgagagggaccggggaatgcagctcggcccagcctccctgcctgaggtcagccatcacgtggtgatggcaagatggaaatgtgctttctgactgctccagccagtgctgccagattcagctccccagggagggcacctgagaggctccaagccaggagatctgttttctcctttgttttgtttttttttgttttgttttgttttattatactttaagttctagggtacatgtgcacaacgtgcaggtttgttacatatgtatacatgtgccatgttggtgtgctgcacccatcaacttgtcatttacattaggtatatctcctaatgctatccctcccccctccccccaccccctgttttctcctttgaatccttcttagaggccgggcgcggtggctcacgcctgtaatcccagcactttgggaggctgcggcaggaggattgcttgagcccaggagttccagaccagcctgggcaacatagtgagacctcgtctctacagataataattttaaaaattatccgggcatagtggcatgcacctatagtcccagctactcaagaggcagaggcaggaggatcacttgagcccaggaggcggaggttgccgtgagccaagatcccaccactgcactccagcctgggcgacagagacccccatgtcaaataataataataataaataaatccttctcagtcccttcctcactgtgtccccctccactgaatttttccacctcctctcccacttcccccactcccgctttccctctccttctctccccactccatctttttctttctctgctgtttctcgtccctccctcctctccatcccacaacactgcctaccctgtccctgccccaccctggtgctcaggatgtgtgaagtgaggggtggtagcccccaagacctcaaccccgaaggttagcctgttgaaaccactttctcccagctgcccccctggcagttggtgctgctgggggaaactgggattgggggccagattttgcctcttttcctgacaaagagagatgaagagttctctcaccaggtgcctgggactggggtgtgggtgtcccagcctatcccagcgcatctgttctgcatcatgattaatagtgctgctttcagccgggcgcggtggctcacacctgtaatcccagcactttgggaggctaaggtgggcagatcacaaggtcaggagttcgagaccagcctggccaacatggtgaaacctcgtctctactaaaaatacaaaaattaaccaggtgtggtggtgggtgcctgtagtcccagctacttgggaggctgaggcaggagaatcacttgaatctgggaagcagaggttgcagtgagccaagatcgtgccactgcactccagcctgggtgacagagtgagactccgtcctaaaaaaaaaggagttttgctctgtcgcccaggctggagtgtagtggcgccatctcggctcaccgcaacctgcgcctcccgggtgcaagcgattctcctgcctcagcctcccaagtagctaggattacaggcgcctaccaccacgcctggccagttcttgtatttttagaagagacggggtttcaccctgttggccaggctcgtctgggactcctgacctcaggtaatccgcccacctcagcctcccaaagtgctgggattgcaggcatgagccaccgtgcccagtcaactccttctcaaaaaaaaaaaaatagtgctgctttctctttcaagtgtcctgatttgggtgatagtaaatgccactctacttataagggatctacctcagaatgctaattgggacatttttgtagcactctactgttggcagcaggtgatgctcacaacagcccgtgagggtggatgacgtccgcttcacagatgacaaaggagcctcatgctcagaccgtgggctgccagagcaggtccatggctgcagccccacatggaccatatttcccccttgtcactctttccaccaagctcccttggaacttcagttattaagctctcttgggtggaatccaagttagaatcacaacatgtgcctcatatggattgtgccagtgaaaaatgacattctatttagaggcagggcagcctggcttagagtcagtttaaaatatgtattatgctgcaacaaatgtaccatgatcctgtaagatgttcacaacaagggaactggatgtggggtatactgtctgtactaacttcacaagttttctgtaaatctaaaactgttccaaaataacaagttcgtttaaaattaactccaggagaccaggtacggtagctaatgcctataatcccagcacttcggaaggctgaggcaggtggattgcttgagcccaggagtttgagacaagcctgggcaacatggtgaaatcctgtctctaaaaaaaatcacaaaaattagccaggtgtggtggcgcattcctgtagtcccagctacttgcggggctgaggtgggagaatcatctgagcccaggagtttgaggctgcagtgagctgtgattgtaccactgcactccaacctgggcaacagagcaagaccctgtctcaaaaaacaaaaatgaaataaagtccaggaaagaagtaggttttaccactcttattttctgaagagaaaactaaatttaatgtgtaaagtgaggacaagttcaccaagttagtgtttgagttgcctaaaatatgtttgctaaaactattcaaagctttcacataaaacatgatcagaagttctatgccaaaacatatgtgtgtgtatatatatatgcactatatatactgtatataaaaatgcaaaatctaaattgccaaccttttagaaattgctctgaaaggaaagcatttcaagataatttgcttacccaaagaatatactttccaagaaagcaagtaatacttaaggtgttcataatcctcatcaaattaattcttgctactgaaagcttacaaggagctgttttgatgtcgggtgtgacaggtttgacttggcagaaggtgtcactttactaacaacattttaaataagtgacagaagacaagaaactacacgttaaatgccagaacaaagagtgtctaagtggatgctaagagttgaaatatggctggatacctgcccaagagagctgaaaagtagatgaaagttggttacctataaactagtgcaccctaatgaattaaaaggtgttgatgagttaacttgttatgccttccagataagacatgcaaatggggcttcttcctccttcactacttccaagggatttaacaaggagaccaatgcaaatgataaggactgtagggctcaagctggggacagattggggaaagggggaccatcatgcccatatagatgtccctgtgccctggcagtcaaggctgctgaaaaataacaaaacccagaagtctgcgtgatgctgcctctccatttgtccaaagccttcttgcggcagtttgcaggcttttgcaaaagctccaggaccaaggagctatgttcatgctggaagcttgttcaggattagctgttctttgtgggatgggtgcagccagggccaggtgtccagggacagtgttttaacaaagggcatgaggtgtctgatctcacagtggaactccacttgcctttttttcatcttctcattctgcttcatgcacagaaccagccccatcctgaaactgactctaaattactcccgccccaggtggagtgcctttctcggagttcaacagagccttcctgtcgcccaagggacaactccactgaatgcccaagccacacccaaaacctaacaagtaaaaaccaaattctgtgctcccccatcctgggccattcctggtttctctactgctgttggtgataccaccatcagcttgtccatcatgaccctggccagttcctcccacaaccctccacagcacccagggacctcacctccattccatccgacacagatctcctcaccacaaaccttggttttgcaacagcagccatgagacctttacaccctccgcccttcatcctgtcccccactgaggccccagagccattccttaaagcagcgcgccacaaactataacccacaagccaattctggtacccagcctgttttgcacagccagtgaactgacaatgatcttttcatacagccagaaaaacaaaacaaaacaaaaaacaacaaaaaaaaaccccaccattctgagcatgtgacttccatgttcaagatgtctcatgttcagaaaggcccctggaaaaggaggaaggggagctgggcacaaagggagaccctctcagctgagctcctcccatccagacattttcctggacttcctatccaatgacttcccttagcttcttatcagccacccctgtctgcccaggaggctggaagatgtggccttttaactgggcacagctctgtcctctatcatatcagggctctgttcccaaggagggtagagagaatggacaccaggtggaccctcagcagtctgtgccacagagggagtgtttgcaatttccagactaaaagtccccatgtgcttgacggggtatgtgactacaacgtgatgcttgacttttcctcatatgaccagagccactttgtccatctggtacaatgtcagctatctgctaggggccctccaggattcccagtcaattccatatctgcatcaccaccattggcactaaataaaataaaatactcaagttcctgctggtgagcatgagcagtgctacactgggcccttcaaccaaggtgacatgataatgactgaaaataatcactgccacttattggggacgtctcatctgccaggcatggtacaaagtgctttaaataagcattcaacaatttcatgctgacagaagccctgtgagccagtggagctactactatgcccattatacaggggagaaaactgaggcagagagaggttaggtaattcgctcagcctcacacaaccaataggtggtggagccaggatttgggccccatctgcctgactctctagaggctctatcttccagtcttccagagttgagtctaagccatgaataggacaattagacagcagaggaaacccattcagccaccatgtgcatgaagagtaaggaatttctgtcatacagaggggagtgaattcactgagctgagagctgaggaaccattgatctgatggctgagacaccactgggaagactggagaggcttttctgggcatgcagtgccaggcacaggaggagctgagggaagatgactaagaggtactggcaaagaattcagaaattctgatggaagctttacatgttaccatcacatccatccatctatccacccatccatccacccatatcttcctccctccacccaatcatgcatacatccagtcatctatacaccacccacccacccatccatccatccatccatcccttcatccatcccatcatccatccaattatacatacatccaatcatatatctgtacataatccattcttccctcggttcatccatccatccattcatccatccatccacccatcccttccttcatccttcctatcatccatccaatcatatatctgtacataatccattcttccctcggttcatccatccatccattcatccatccatccacccatcccttccttcatccttcctatcatccatccaatcatacatatatccaatcatacatctgcacatcaccagctcatccatctatccatttatccatccatccttccttccatccatcattcatccatcatacatacatctaaccatacatctctacatcattcattcttccatcgattcatccaattatccatcattccttcctccatccatcccattatccatttgatcatacatatatcatctatacatcatccattcatccatccatccatccatccacccatatcttcatccaatcaatcatacatacatcgaatcatctacacatcacccatccatccatccatccattcatctatccacccatccatccatccatccatccattcatctatccacccatccatccatccatccatccatccatccatgtaaccatccagtcatatatccaattacacatccatccagttatacattcatacatgcatctaatcattcaattatacatacacacatccatataattctacatccaattatacctccatccaattacacattcatacacccacctaataaattattaattcatatatccatccatataattatacatcaattatacatccatctaatcattcagtaattcacccaccatccagtcatctatccaataatacattcatccaatcatccatccatccatccacccattcatccatccatccgtccgtccacccatcatggtatgagccatgatttaccacgatggtcccctgtggacagcccaggtggggcagaactgaagggaagcccagggctgcccccataaacatttgcctcctttacatggatgagaactagatccacatgtataaatcctcatgatttgaaggtgcttttaccaacattcactcatgggattctcccaggagctctaggaggaggcaggtagagttgaggtcatctcacgcattttacagatgaggaaacggaggccctgagaggcaggtccaaggccacctgaccagaaagaagtggaactgggacttgaacccagccatcttgccccttggtcccatgctctctagcctgtaactcctgcttcctggtggggcatctccaggaggaccctatcggctggccatgggcctgccctggagtcttttgctctgtgtggccatccttcctccctcaggagagtgtgtgctcccagagcacaggctgtatcttctgagcattttgtcccttcccagtacctagcactcagctctgtatacattgggctctcaagaattctcaaccttccagagtgtaaggccttgacctgctcagccctggatactgcatgatgcattgataagcccataaaataaccagggcagattgactcccagtggccaaagtgccacagggaagggacaattcagcccttctaggaggaggaggaggtagttttctcatttctattaaggcaacaaaagctgccttactaaggacattcttggtggagggcgtgactgtcaaccactgtgatcatttgggcctctcttgcccaggcttcccattctgaaaggacagttttattgtaggtacacatggctgccatttcaaatgtaactcacagcttgtccatcagtccttggaggtctttctatgaaaggagcttggtggcgtccaaacaccacccaatgtccacttagaagtaagcaccgtgtctgccctgagctgactccttttccaaggaaggggttggatcgctgagtgtttttccaggtgtctacttgttgttaattaatagcaatgacaaagcagaaggttcatgcgtagctcggctttctggtatttgctgcccgttgaccaatggaagataaacctttgcctcaggtggcaccactagctggttaagaggcactttgtcctttcacccaggagcaaacgcacatcacctgtgtcctcatctgatggccctggtgtggggcacagtcgtgttggcagggagggaggtggggttggtcccctttgtgggtttgttgcgaggccgtgttccagctgtttccacagggagcgattttcagctccacaggacactgctccccagttcctcctgagaacaaaagggggcgctggggagaggccaccgttctgagggctcactgtatgtgttccagaatctcccctgcagacccccactgaggacggatctgaggaaccgggctctgaaacctctgatgctaagagcactccaacagcggaaggtgggccccccttcagacgccccctccatgcctccagcctgtgcttagccgtgctttgagcctccctcctggctgcatctgctgctccccctggctgagagatgtgctcactccttcggtgctttgcaggacagcgtggtgggagctgagccttgcgtcgatgccttgcttgctggtgctgagtgtgggcaccttcatcccgtgtgtgctctggaggcagccacccttggacagtcccgcgcacagctccacaaagccccgctccatacgattgtcctcccacacccccttcaaaagccccctcctctctctttcttcaggggccagtaggtcccagagcagccatttggctgagggaaggggcaggtcagtggacatctgatcttggtttagtatccttcattttgggggctctgggtgtggcctgggcctctggactttggccacggtgtttgttccagcccttctcctaacctgtcctttccagacactcggcatctaggttattagcacctcgcatactttctgacatgctcctcagtcctgattttgaccatcttctcttgcttcccatctgtgtcagtcaagactgcatttggctgtaagaaacagaaaccccaactaactgtggcatttacatgaagaggtttacttttctcacataatcagatgtctagacttggccagcacctcaagggtcattgatgctctcctgtctttattttctgtcatctttagtggttggattgttgcctcatggttacaaagtggctgctgcacttccaggcatcacatctgcctttgaagcaggaacaagttgcaaagtaaagtggccaaaagggccctgaaactaaatgtgtccccttaggaaagcaggagttttcttgcaagtggcaatcttctgcttatgtctcattggccagagctgggtcttacggccaccccttgctgcgagcaaggctgggacattgagcattttgccgtccaacctctttagcagaataaaccaagggggaagaacgttaatagtggcttttgagtcactagttggcagtatctgcccctctatctttccatcctccccatggagtttcaaggttcctttctcagtacttcttcaggctctgcacgttcatttggatcttgtgtcttggggtgaaaaactggcccaagtgtctccccaagcatccacctttggattaatttggaaaatggctgtcaagtgcccgcctcttgcttggtataatgctacagctttagaggacgcagcaggcatgggccttgccgctgaggttcttagcctcatgagaatatccagatcagattctcttggctccttcttagagccagtgatgcaagacacttcctgctcatcttgtcgggacggttttacaagttgcctgccatcctgagaaagtctacaaaacgatgccagacctcatgccagcttcccaagccttgactctcagtgctccctcaacaggattctggaagaatctcccaaacaagtcgcaatgccctctggaccctgtgcaggcatgagactcaagagcattggctcccacccctggtggagggaacactgctggggctgggatcttgcctggttgctccgcctgcacccaagacaaccataattaaaatgtccttcattgaacttggaaagccttcaaagctgacaactccttatgtgtacccggaaaggcctgggagtgtgccagggcattgctcgggagggacgctgatttggaagcatttacctgatgagagactgacagcagctcctggtagccgagctttccctcctgcctctgctgtgaaggtggacccatccaacagtcaaatgcctgactctggacaggagcggacctatttattgccatgcaagggactctgcacttttgaattgtgggtcatgggcttggatttaggggttagagctgggagaagtcttggaagtcacctagagatgacactgccattttgcagatgaggaaaccgtccaatcaaaatggaccaaggacttgcccaaagcctcacagcaaaaccataggcccccgcactaaccccagagtccctgtgctgtcttaaggatcatatagttgtaagcaatcatctggttttcagtatttcttcttttaaaatgcctggggccatgcccagcagtctgtttcactgcagcgtttacacagggctgccgggctttcctggtggatgagctgggcggttcatgagccagaaccactcagcagcatgtcagtgtgcttcctggggagctggtagcaggggctccgggccctacttcagggctgctttctggcatatggctgatcccctcctcactcctcctccctgcattgctcctgcgcaagaagcaaaggtgaggggctgggtatggctcgtcctggcccctctaaggtggatctcggtggtttctagatgtgacagcacccttagtggatgagggagctcccggcaagcaggctgccgcgcagccccacacggagatcccagaaggaaccacaggtgagggtaagccccagagacccccaggcagtcaaggccctgctgggtgccccagctgacctgtgacagaagtgagggagctttgcgtgtttatcctcctgtggggcaggaacatgggtggattctggctcctgggaatcttgggttgtgagtagctcgatgccttggtgctcagttacctccctggctgcctgccagcctctcagagcatttagggccttctggacttctagatgctcctcatcttgcctcagtcagcgcgtcagttccagagacttctctgcagggttttctggggcaggtggtggcagacccgtgccttcttgacacctgaggtcagtccaccctcctgctcagactgcccagcacagggtcacctcccaaggggtggaccccaagatcacctgagcgcacagagggtgcagatgactggaccacaccttttggtgatcttaatgaggtggtcccagaggagctcagacatgcaatctagcatccagttctgggactctgtctccttttcaaacgtattcatgtagaacaggcatgacgagaatgccttgtcaacatgggtgatggggaatcaatcagacagggcgccgggctcaaggctgcagtcacccaagagtggctcagcccaccaggccctaggaaacgcctgcacagcctggagctcctggagtcatttccttcatgtcttcttcactgcacttacgtaaagatgccagccattggtttggtgatttggagggtgcccagttgcccaacaagaaatgcagaagaggcctagccaggatttcaccagcagtggagagtagagaagatgtggccagaaaagagtttcctttccctcctaaagatggtactccctgcagctactggggaagcctgcagcattctctagggctctgtgtgttgagagcagccccaccctggccccttctgagtgcatttctgctttgtgacttgatccgtgaagtcccctgagatgggcagaggggatgtcctcgaagctggggcagagcctcatccttgaacgtgaaggacgtttgaagactgtggcatgatcacaggatgagatcacagggaacttgagtttctctcctcctctcccttcacagttatttcactgagggaaatccctcccctgcccagaatgaaaactctagccaactcttgacttttccatcactccaaagtagttgaaagtacattagtctccacagtggcaaaacagtgtgcaaaagctaaataattagaacagccagtcccatgtgacagtcaaagcttctaactccattcaaagttgcagccattcccctcgagggctggcagggaggggaggggtaagagaaacaggaaggttcttactgagttggtcctggtgtgagctgcgtcacactccctgcagaggtttcaaggagactctctctctctctgtctccatggggaccttatttgaattcttctactcttaccccagcctgccatctccagctatcctcccctgaagagcccttctgctgcgctggattctggtggccatgtcatctcctcggccccgtgggagtctgaagatctggctgcagcctcacctctgaggtcctgctagttgccacctcttaaacatgatctgaggctcccatgcactctgacctgtgcccacatggggcccacgggaaacacgctggcaagcaaactgtgggtgtgcagacggttctcagggctgcagcacctgtcctttgctctgcccccaaagcaaggccagcccatcttccatcctctagtgttccttggtggggccctgaccacagtccaccaggtccctaaccagaggggacacacaccaggtgtcctcaatgtattgccttgaaacagttgtgctgggactgtgatggggggtggccatgtagccacccccaccacccccaagccactctctccaaggaaatcctcctaaagatccctttacatcctccatgtggtggggaggttctagagttgggtgcatgtgtcttcagctactgacaatgcagaccttagttggcacctcgctctggcctatcctgtttgctgttcttggcgctccagtgaaactccccatgggccatccagttggggtgcagtgtggccacccccttgcaggttcctgccttgctggagagcacagggccctcctggctcttgtaaaacactccccatggtacagagaggccagcagtgatgtgaggcccaacctccctccatggtgttcccaagcagctccctttctggggtcaaggggtggcaaagacagtgcagcgtccaatttctgactcaagccgggcctggctatcgcagctctgcactgtgtgtgacagcaaggcaactcacccagtgccgtggcagtgaccgtgtccgaggaagcctcctcacaccctctgtctcaaggactctggcatttagctggacttgctgtagctctgagcctttctgccattgccatcaccttgtcagaaactcaggccgaatctgcactcagagttgtgcccaggcagttgagccaacacttgctcagcgatattgtcacatgacaaggcactgtcaccactgggcatcgtgggtagcgcagtgtcggctggatggacccggagggtgtctgtgtcatgctagtgctagtgatgggagccccgtgagcccattgcccgccctcccatgccctcagcagctgcctggggacagccaatggcctgggtgtttctgaggctaccacatggcttccaggaaactcgagaacctttctctcccttgcctacactcttcacacaggcctgtgctggccagcggtggggatccggcattcctatcttaggtgcagagagtgactgactcattgcaggcctgggagataagactgatggcccagccagcaagatgtatggatttctcagaggcagtggcctctgtcattgtcctcaggaaatgctggtgattctggtggcctgaggtcaatgcatgtcaacgtggccaacttgccttataaactttttttctggacaattgcgtgcactgtcctgtaacagtgtcctgttgtttatgatgcagaaataggtgtttttaaagcctattgattttggtactattaatgtggtcaggaactttctcagtctttcttgtttggggtgagctgtggcttcctaaacaggaacccaagacacccccaaaagctgctcaccagcactgccagcctccctcttaccaagtagcacccgttcaggacattctgcgaaaggcatttgcccagaagttgggaggaaggaaatgtaacattttggggcacctaccatatgccaggcaccaggctaaacgtgttcacacaaattctcttactaaccctcaccatccttctacaagacaaactagtatcttcatcttggggttcaagatgaggaaatggaggctcagagaggttgaatgaatgccggtgcctggatatgaaccccatctgcctgactccgcaacccaggcaaagtctttccttgaacttcccagcagccactgcttagacacagcctccacaaccatggctcagcagcaaattgcttctctgacctcactcagcctgtgtgtccttgttgagtgaggcattcaggaccctggtcccaaagtggagaaagtctttcctactaggtcatagctacacctgcatgtgggtgctgtgccttttgtttagtgaacttttatcaccagcatcctcagcaatgacatttgcagagaagccagagctgaggcaccttggtattcttgggatgtgactttcctgaatgtttaagggaaaatgcccgaaggtacagagagcttggtttctagtaaacaataactgtcttgcttttaccccccttcatttgctgacacatacaccagctgaagaagcaggcattggagacacccccagcctggaagacgaagctgctggtcacgtgacccaaggtcagtgaactggaattgcctgccatgacttgggggttggggggagggacatggggtgggctctgccctgaaaagatcatttggacctgagctctaattcacaagtccaggagattttagggagttggttcttatcaaaggttggctactcagatatagaaagagccctagtggtttttttctaataccatttctgggtaattcctaaggcatttagtgttctgaaagatgctagccttgtccagcctgggagttgagaatgaatgtctaacagaaactctaggccgggcctggtggctcacgcctctaatcccagcactatgggagacccaggtgggcagatcacctgaggtcaggagtttgagaccagcctggccaacatgtgaaatcctgtctcactacaaataaaaaaattagccgggtgtggtggtaggtgcctataatcccagctactcaggaggctgaggcaggacaatcgctcgaacccaggaggtggacgttgcagtgagccgagatcgcatcattgcactccagcctgggcaacaaaagcaaaactccgtctcaaaaaaaaaaaagaaactcaaatatgtgtgacaggcgattctcactgcaggctgccctgtggctgatccaggagcaaggccttaaccatgtcatccccaagcgattgcttgtaaactttcttctgtgcagccttcaacccttattatgattttcttctcaggaaccaaactgctgtattcaagaaaggcagctttgtgtaatcatttatcataaatatcttaagaaaaatcctagagattcctaattttaggaaatgggagacctatggtactgatataatgtgggctgggcttgttttctgtcatttgctagataaatgaacttgagagcctactgtaaaatgtggaagcttctagattgcagaagggctggaaagacactgttcttttctcccgagtgatgggatctgtccagtatttagagctgcctctgaggccatctgattctaggagactctgcctcgttgaggatattttgaggcctaactacacattcctgcccccagagaggtcacagcctatagcaggctgatgtttctcatgtcacatggcacagaaaggcacattttcgttctcaggctaacaaagagcttcaaaaactattagaagggacagtggctataagagaagaacctcagtcaatgtgtgaaattaactaggaacctggctcctgtttcttttaggtcatgtttttcagcttaggtaaaactagaggctttgataaagcatgacctctagaaatcattgcttttcataaatggaagtgggtttgagttttttctactgattgttagtgcaggtgatgtctacatgcccccagaacatattccatgcaacaaaaaaagcccaggtcaccgtctttgctgggaacttgacttttgtgctcactgaattttaagctttctgacagcagcctggaatcatggagggataaagtacctattagtaagatggaaaaaggtgtttcaggttggagctgcagtctgttgagagtaagctatgggaaggcctgtatacgaggggtggacttttcttctgtaagtgtccagagaccaggcctcctgaagagggcatgggggcttaacttacctggactactgtgtttacaatactcatttatcttgaactcctcctaacccctgagaattgctacatttagtatttgctgagtacttcctagcatcctagggaatcaatagaacattctcccaaccaggctgggtgcggtggctcatgtctgtaatcccagcactttgggaggccaaggtaggcagatcccttgaggccaggagtgcaagactagcctggctgacatggtgaaaccccgtctttactaaaaatacaaaagttagccaggcatggtggtacacacctgtaatcccagctacatgggaggagtaggaggcaggagaattgcttgaacctgggaggtggaggttgctgtgagccgagatcatgccactgcactccagcctgggcgacagagtgagtgagactctgtttaaaaaaaaaaaaaaaaagaacattctcctaacctggcttcttcctccaggggtgtaattaatcatgtcagtttcctcattgatacacacacacacacactacaatcctgtatccattacttttcaaggtacatttactatttacgtttggggtccttgtctcttttttaatagtgtttcttaaagtcttgtattatatcagagtacagtaacatcccagtcaagagcactctagtaagctctaggaggaaagcgacttccggaaggcagtggagacctgtcctgttggggcagcataggggcagcccctgcctctggtcagttctggcgctcaggctcagggttgcctctgggctgttcttcccagagactgacaaagggctcccataaggcacctgcagagcctgtgagaagctgaagtcaatgttttcctgacaccagttgatctgtgcaggatccattgatttaaccacctgctgtgtggcatgcactgtggtcgatgccaggaacaggaattggaggggcccatgagcatggccagtatcacaggctggaggtgctgctgcgctctgaccgggcctcttggggatgagcccatgtcaaccaccttgcctccgatggggtcgggcccacaggttacctttgtgtgtccatgaccacaccttcctccccgacctcatccaaatctctttcttttccaagcccctgaatccttcagggctgcaggttttgtttaaagcagagctggtgagttgcataggttgttgcattgggactagatggggtgttcaaagagttgggagttaaaaaacataaagggtatttattaggagaaccaaggagtgtaattctcctgttcttaatatgcggccaggttaatgaatgtcacgtgaatgaaccagaaaaaaatgaagtgtgcccttgatcagctgggttggtgtgcagcaagctgtgtgaccaggggacagcagtggtcctgagggccgtcactgtctgccgtgcagagcccttcctcccacgggggcctacctcacctgtgccaagggcttgtctgtggtcagtgacctggatagatctgaatggggcttctttttcgaggagtcttatggcaggtctctcagtaaagactccattcttgatgatcacacattttggattttccaaatctgtcagagaatgggcttgaggcggggtttgtgggcactagtttcactggtttcatttaccaaaaaggggagcagaagtcaagtatggtggctcatccctgtaatcccagaggcaagagaattgcttgagcccaggagttcgagaccagcctgagcaacataaggagaccccgtctccacaaaaatgaaaaataacattttagtcagacgtggtggcatgcatctgtggtcccagctgcttgggagggtgagatgggagggttgtttgagccctggagttaaagttgcaatgagctgtgattgcaccactgcactctagcctgggtgacagaacgagaccctgtctcaaaaaaaaaaaaaaagaaagaaagaaaggaaaaaaaaaactcatgcctgtaatcccagcactttggggaccggggtgggcagatcacgaggtcaggagatcaagactatcctggccaacatggtgaaaccccgtttctactaaaaatacaaaaattagccaggtgtggtggcacgtgcctgtaatcccagttactcgggaggctgaggcaggagaatcgcttgaaccagggagtcagaggttgcagtgagctgagatcgtgccactgtactccagcctgggcgacagagtgagactctgtctcaaaccaaaaaaaaggggtggggggcgggggcaggagaacagtgagaggtagggagaggaaaggggattctcgctacacccaaaccagataccatctagaggctagaatctttgggaggctcaaattccctagaaagcaggagaagcttctgtagccctcccgctttcccagtagattaagcccagggcggctccagatgtgtgacatgctctgtgcccaaccagagcccatcataggcagaggaataacacccacaccagaagggccctcggaggtcaccacgtccaagaaccctctttacagatgaggaaactgaggcccagagaggggagagccacctagcgagctggtggcggctagaccaggagagctgtcattccaagcaagcaaaggcaacgagacgagcccagagctgtgctcccatctctttgttagggggcctgggatgccctctcagtgtcattttgtccaggatgatgctccctctcttaagcgattaatgcgcccttgctaaccttttgctatcgctgcctcttcaaaccagaggagttgagagttccgggccggcagaggaaggcgcctgaaaggcccctggccaatgagattagcgcccacgtccagcctggaccctgcggagaggcctctggggtctctgggccgtgcctcggggagaaagagccagaagctcccgtcccgctgaccgcgagccttcctcagcaccgtcccgtttgcccagcgcctcctccaacaggaggccctcaggagccctccctggagtggggacaaaaaggcggggactgggccgagaagggtccggcctttccgaagcccgccaccactgcgtatctccacacagagcctgaaagtggtaaggtggtccaggaaggcttcctccgagagccaggccccccaggtctgagccaccagctcatgtccggcatgcctggggctcccctcctgcctgagggccccagagaggccacacgccaaccttcggggacaggacctgaggacacagagggcggccgccacgcccctgagctgctcaagcaccagcttctaggagacctgcaccaggaggggccgccgctgaagggggcagggggcaaagagaggccggggagcaaggaggaggtggatgaagaccgcgacgtcgatgagtcctccccccaagactcccctccctccaaggcctccccagcccaagatgggcggcctccccagacagccgccagagaagccaccagcatcccaggcttcccagcggagggtgccatccccctccctgtggatttcctctccaaagtttccacagagatcccagcctcagagcccgacgggcccagtgtagggcgggccaaagggcaggatgcccccctggagttcacgtttcacgtggaaatcacacccaacgtgcagaaggagcaggcgcactcggaggagcatttgggaagggctgcatttccaggggcccctggagaggggccagaggcccggggcccctctttgggagaggacacaaaagaggctgaccttccagagccctctgaaaagcagcctgctgctgctccgcgggggaagcccgtcagccgggtccctcaactcaaaggtctgtgtcttgagcttcttcgctccttccctggggacctcccaggcctcccaggctgcgggcactgccactgagcttccaggcctcccgactcctgctgcttctgacgttcctaggacgccactaaatcgacacctgggtgcagctgctccactccctcggcctcctcccgtgctcaggctgtggccgcacgcgcccctcacgcttgcccgccactctgcatgtcaccagcacccccgctccgtgctacccaccttgtttgactctctggccacttgatttgtccacaacggcccatcagcccacaggaggtttggtgggtgccttccaccgacaggatgacgggtgccctcatggtgtctagaactctccaaccctcccatgtaggcataagcagccccactttgcagatgaggaaacggaggctcagagaagtacagtaacttgccgaaggccaatgagtagtaagtgacagagccaggtttgggatccaggtaggttgtctctgaaagacacgcctgtcctgcatcccacaacgcctcccaggaggtgctggagtgtggacgcctaacacagagatgtgcagggcacacacagcaggtgacacacacagcatccagaggtggcccagagctcatgctgtgcctttggcccagtgccctgcccccacccactctgccttgtggcaggaagacaaggagcagacacaagatctccctggtccacatgccaccacctccctctgcagaggacaaggggatcctcatgctggcattggagggggttgagcagggcccaccttgagccctcaggagcacgaccacagcagccctgcagggagggattggtgggaggagagtcccaagtatcagggagaggagagttggtgtcccacaggagacctcagagccacaaggcgagcttgttcataaatttgggacccttagcatttcacagttatttgcagagcccagaaatggatgttactgaagctcacagttgcaagcatctgttaaatttttattagattttacttttagggaaaactttgaaatgctataaagaagcctgtgtttaaaagttaagacagaggctgggggcgatggctcacgcctgtaatctcagcactttgggaggccaaggcaggtggatcatttgaggttaggagttcgagaccagcctggccaacatggtgagaccctgtctctactaaaattacaaaaaattagctgggcgtggtggcgggcacctgtagtcccagctactggggaggctgaagcaggataagtgcttgaacccaggaggcagaggttacagtgagccaagatcacaccactgtaccctaagcctgggcgacagagtgagactctgtctcaaaaaataaaataaaataaagttaagagagaaaaaaatatatcctatatcctttgttaaattccaaaacagtaggggacaaataactgacttgacaggttactacaatatttcctgaaatgatgttttcttgaatactggcctactagaggttcataggtgtgtttggattaaaaaagagttccatggcccagtgactgggggaaaaaaataaaagactaaagtaagttaaacaggcttttctgctgcaggacttgtcagagcctttaatgtactaatggccattgtgaccctctgagaaggtcacagagtgggtttcccaaacttacttgattctacctgctaacatttcctggaggaagtttgggaaatgccgatttagcagattcttttgttgtgccgtggatggtgctggttgatgtgggcaaaacaaagaacacgtgagtcagatccgcctggggctcttactaaagtgcaggttcccaggtgccactttaggcttacagacccagttgtggggtaagcctgggagtcttttagcaggtgattctgccacatagtatagttggaaaacctctgggcatactcattgctggtccctctagaaatccaggtgacaatagccaatgagaagctccaagagacccagttgtccatggggtagagggaatgtgatattgaaaccaaagaagaaaatctatgatcagttttcagcagtgactgtcaagagaaggagaagggtgagttagcgctgatgctggctgacaggtcagcgggttggtttcaccaaggagtgtgatgaaggctgatgttgtctgtgggaatgtatgatggtaactggtttgtagctaatttggggaagcagtgagaattcgtgccctttgaagaccagtaagtggcaagaaacccaccaggcctggctcagggctgggctgggcttggctcgtctcagagcagctggggctggtggccaaagccaccattagtgaggggcaggccctgggggtacaaccagcaactaggggacaaagacaaccctgccagcctctcctattctggaggcgtgtgaccagaaatggagatgggttggtcagcataagatggccaggaaggtggaaatcaggactgctggcaatctagccacatgggcaggggagccgggtggttccaggcagtttccaaggccaagagggtgagcaggcacctcacagggaatcagggccaagcctggctgcagtgtggagacaatgcacccacccccatccttggatcttgcaggaggctgggtcctcactgagctaccaacatccatggccctgaggcttttaaaacacccatccatggagtggggctggtcccagtggggtgaggctgaccctggcagaaacagggcaggagcctgtgggttagggagactgcaccttccttagatagcctccatgccatcatgtccccgtgacagtttctgctgcgtcccctctgcatggtcccaccctcggccagcctgctgccccctcttgccaggttgcgctaatcagtgaccccagtgtgctgtgttgatactaacaatgcgaggcctagcagattcaagggaaaagagaaccaactgggtttccaccagacccaactaaacaaacatggacctatcccagagaaatccagcttcaccacagctggctttctgtgaacagtgaaaatggagtgtgacaagcattcttattttatattttatcagctcgcatggtcagtaaaagcaaagacgggactggaagcgatgacaaaaaagccaaggtaagctgacgatgccacggagctctgcagctggtcaagtttacagagaagctgtgctttatgtctgattcattctcatatataatgtggggagtatttgtcactaaagtacagctgtcatttaaagtgctttgtattttggggcaggcttttaaaaagtccagcatttattagttttgatacttaccccagggaagagcagttggcaggttcatgaagtcatgctcctaattccagctttcttagtgtactttcagtgagaccctgacagtaaatgaaggtgtgtttgaaaaccaaacccaggacagtaaatgaaggtgtgtttgaaaaccagccctaggacagtaaatgaagccatcttctcactgcataaactgcacccagatcttcgcccatccttctcagtatttcacttcacccattgtttactgtctcaatgactggggaaatgtctggggaaatgctcccgtaattgcacagtggcgtttttcctggaaaatcccaccatggctctagataagacctatttttcttaaaggtatctaaaatttccagcataaattctgtctgaaacacctgaattttaatcagtactggagcccggagggcatctccagttgccacatagctctgagcattcagtggtgtgttgagggctgctcccggaagtgcctgcagagtcagggctccccagcctcatctagtgaggcagtggaagggcctgtggggatttggagagctggcctgggtctctgaagtgatagtgacagctgcttgtcaatcacggtgcacatttagtgctgggggcagggggcagggaataccagcctcatgcatgcatgcattcatttgttccttccttcattcattcattcagtacacatgggtacaacatccctgccctggagttgcccagagtctagggaggggaaagatctattaccctgggcctcggccagctggggagtgctgctggtggagaggggccgtgtgcagcgagggaaggaggagtcgtcaatacccccaccccagctttgctttcttgtcatcagccccagggccccagcctgtgtccctcctctcccattgctacttcatctcctgggtcctccttaccaagcctgaccacacagagggccttggccgcttccatggggaattggaaagcaataagatagcatcccctagaagcccagtgaagtctgggacaggacccttctctgagctctgacttgctcttggaaacacttcgaggcttagcctccccactttgtttcccgagagtgtgacctgttcccctccaaacacccccttctcctccagggccatgcccacccgtcaaaatcccccacgggcaggacgaactgtgggtgtcagtcaccatctatcctgcatcctggttccagggccccccccagccccgcctccatagggacaggcgtgcagacacccgtccctggctgcttcctcttgtggaatgggttcaaaagtaagcagtgttgtttacactgacaaactgaaaaaaaaagaaaaagagataacattggaggcttggcacagtggctcatgcctgtaatcccagcactttgggaggctaaggtgggaggatgtccccagcccaagagttctagaccagcctgggcaacatagcaagaccccatctcaaaaaaaaaatttaattggccaggcagaggtgggaggatcacttgaacccaaagggtggaggctgcagtgagccgtgatggcaccactgcactccagccagggcaacagagggagaccctgtctctaaaacaaacaaacaaacaaacaaacaaaagagttaacattggccagattaggattcaccagatagtgttaatattagtttgatttgagactttaatcagaaagcacatgtgtggtgggggtgggtgtaacctaagtcaggtagaatctttccaacttggggggggcacactcctgattgtagccatatgagtctgtcagtgtggtggaagaggccatgggttaatgggcaggtaaaaaagcaccttgcctggaattgagtagaaagtaaggcccttcagaccccgtgacacacttggggacattttcttgagtaacatcctaagattcatgtaccttgatgatctccatcaacttactcatgtgaagcacctttaaaccagtcgtctccaaattcaggggcacagtaacatccaacaggctggagaaagaacgtactagaacttccattcctttttcatgtcctcttctaaaagctttgtcagggccaggcgcggtggctcacgcctgtaatcccagcactttgggaggccgagacgggtggatcacgaggtcaggagatcgagaccatcctggctaacacagtgaaaccccatctctactaaaaatacaaaaaaacgagccgggcgtggtggtgggcgcctgtagtcccagctactcgggaggctgaggcaggagaatggcgtgaacccaggaggcagagcttgcagtgagccgagattgcaccactgcagtccagcctgggcgacagagcgagactccgtctcaaaaaagaaaaagaaaaagaaaaagaactgtgattggggaggacggtcactttcctgttcttactgatcagaagggatattaagggtacctgattcaaacagcctggagatcactgctttcaaccattacctgccttatttatttttagttactgtccttttttcagtttgtttccctcctccatgtgctgacttttattttgattttatttatgtttatgtttaagacatccacacgttcctctgctaaaaccttgaaaaataggccttgccttagccccaaacaccccactcctggtagctcagaccctctgatccaaccctccagccctgctgtgtgcccagagccaccttcctctcctaaatacgtctcttctgtcacttcccgaactggcagttctggagcaaaggagatgaaactcaaggtaaggaaaccacctttgaaaagaaccaggctgctctgctgtggtttgcaaatgtggggtttgtttatttgttttttagcctcaaagacctttcttcaaatgagttctggcatagaagcaccgtgtaaaatagttagaattctgggcaaaggggaaaagagagctgggggccatccctctcagcaccccacaggctctcatagcagcagctcctaagacacctggtgggaccttggtttcgaaatcgctactctaaggctgggcacggtggctcacacctgtaatcccagctctttaggaggccgaggagggtggatcacctgagatcaggagttcgagaccagcctggctaacatggcaaaaccctgtctctactaaaaatacaaaaattagccgggcgtggtggtatgcgtggtggtaatcgcagctactcgggaggctgaggcacaaggattgcttgaaccccagaggcagaggttgtagttagctccagcttgggcgacagagcaagaccctgtcgcaaaaattgtttaaaaaacaaacccaaaattgctactctcattgggttcctttgcccattcctgattttggcaagagaaatgcttccagattgccctgatctgggtaggacagcatcacgccatagcaacactgccccgtgagctcactgccccctcaactagcttgtggtccttggttaatgtcagtttcttttttgagtttgtgttatgtctaagggtcatctgctgggtaacggaacccagggactgccctagtccctagactgtgccatgcccgactctgccagctttgtcagtgatgctggtgctcgcctcctcgggtgctcgcctggtctgagcacacccaaggagttcttgaggccttagggttgtttgcgagagaatgaaagaacacgacctagctctctttagcatccttggtcaggttcaacactgcccccaggggcctctggtggagccaaccaccatcagccaaataaatccataattagagtcagaaaatggatgtctgcatatgtgtagtgcactaatgtcctgccgatgattgacatggagtggagagtgacctgatcattgctgtgagctctgctggccttggcacaactcatgctgataactaatgcacacagttcctctgggaggaaatgtcctcagggaacttggagtttgggtggggatgtgggtttgtgtgcccagcaagcccttgtggttgtagcagacactagtggcatctaggaggcaaagggtcaccccagtcttagccacgttttgagtcaaggtggcggagtggggctggtgttgactcttggtggcagtaacttttcccaatggtgaaaaacccctctatcatgtttcatttacagggggctgatggtaaaacgaagatcgccacaccgcggggagcagcccctccaggccagaagggccaggccaacgccaccaggattccagcaaaaaccccgcccgctccaaagacaccacccagctctggtaagaagaacgttctcttgaatcttagaggaagctgaagctctcagaggtacagccttcattttaggaggccttaggccactgagaatgaataacccctggcagctggtcagcagcttgcagtttactaagcactggagtcttcattgccttctcagtccttttgatttctgaggcaaatgttgaatccctacctttttttttttttttcttttgagacagagtttcgcttttgttatccaggccggagtgcagtggtgtgatctcagctcactgcatcctccacctcccaggttcaagcgattctcctacctcagcctccctagtagctgggattacaggcacctgccactatgcccggctaattttttgtatttttagtagagacagggtttcaccatgttggccaggctggtctcgaacgcctgacctcaggtgatccacctgcctcggcctcccaaagtgctgggattacaggcatgagccaccactcccagcctgaatcctcactttttatcaatgaagaaattgaggctgattctgcagcatgataaaaaaaaatacagaaaaaggaaaaaaaagaaagaaatcgagcctctgagagtttgcttgactgagtctaaccagctcattttaaacccgaggaaaatgcagtcacatgactactaagtggcagctctcggagcctctctggccccaagtccagggttccatagaggcagccccagcatggcatgttttcagtccccaaatgagactctggagacaaatgtctctggagacagagcagcagcctggataagtcacaatgggtgacgtcactcagggctcaacccctgggcagcttaacttgctagggacgttaggagtctgctgcaaaacctgagggtcttagctgagcagtcacaggctgggcccgttgccctgggctcctgtgagtaaaacccagtcaattttgagtacccagtaaggcatccattgagttattttgcagccaggagtgctattaagaacagtcgcggctgggcgtggtggctcatgcctgtaatcccagcactttgggaggccaaggtgggcggatcacctgaggtcaggagttcgagaccagcttggccaacatggcaaaaccccgtctctaataaaaatacaaaataattagctgggcgtggtggcgggcgcctgtaatcccagcttctcaggagggtgaggaaggagaatcacttgaacccaggaggcagaggttgcagtgagctgagatcgcaccattgcactccagcctggatgacaaaagtgagattccttctcaaaaaaaaaaaaaaaaaaacagtcgtcctctttggggattagggacagcctgcctgcctgcccgagcacttctctcttccattgccccagtgaagtattccaggcccctgggtttagactctgcaccatgtaggggtgtctgacctgcacttgctccttggtggcacgggcagcctatggcacttgctgcgggctgtgaccaaagcctggcctggatcttggatcttggtgactctgcttctccctggcctgagggagctgcccagagcctgcccaccacctgctgcgtgtctttgcggtggcatttctcgcacacatgccgtgcagtggcacccccaaggatggccattcactaaggcccattgtttttgtcttttcgcttcgtgttttctggcctggtgtttttctcatatacatgtgatccagggataattcccagaattttgacaggattttaagtagcgtttggatcctgctgtttttttttcacttaacatcgggccagttgactcacactctgttttttgttgttgtttttttgagacggagtctcactgtgtcacccaggctgaagtgcagtggcacaatcttggcatactgcaacctctgcttcccaaattcaagcagttttcctgcctcagcctcctgagtagctgggactacaggcacaggccaccacgccctgctaatttttgtatttttagtaaagacagggtttcaccattttggccagcctagtctcgaactcctgacctcaagtgatccgcccacctcggcctcccaaagtgctgggattacaggggactcacactttgtaacaacctgaaacaacgtgatgcatttccctttgggtcttacctgctcttcggtggctgcctgcaggtggagagaccctcccccttgggcccctcgaccttgtttcagaatggggcccctgctgggccagctgtgggtgcctgccacgtgaaggactcattaaggccctgtttaagcctgatgataataaggctttcgtggatttttctctttaagcgactaagcaagtccagagaagaccaccccctgcagggcccagatctgagagaggtactcgggagcctacttcgctgggagcagcctccctttgcgtgtgtggccattcactggcttgtgtttctagagccgggaggacccttttctgcaatgcagggttcacacagggttcgcagcctgaagatggagcagtccgaattctcttccctgtgcagtttgcgcagctgtgtttgtctgatgggctttctaatcctgtgtgctctccttgacttcagggacaatggcattacaggcatgagccaccatgcctggctgtctccctatgtttcagatgaagacataggcttaaggaggtcaggtgacttgcccacgaccactctgtaaataagaggcatgaaaagtatttggagccaccaccaccaagcccactggtcaccctgggtctctgaagtcagggaggcaggaggatgggaggtctgaggaggcagagaggctgagcctggaggccctggaggccgaggccccatctgttgtttccttatgtggaaaataagaggcttcgtttgtcctattgccacagagcgtactacttcaggaacatccaagacatggaaatccgcagggcacggtggctcacgtctataatcccggcactttgggaggttgaggtgggagaatcgcttgaggccagaagttcaagaccagcctgagcaacatagtcagaccccgtctctataaaaaacattatttttaaaaaagacatggaagtcaaattctaaaaactggtgctggctgggtgcggtggctcatgcctataatcccagcactttgggaggccgaggcgggtggatcacctgaggtcaggagttcaagaccagcctggccaacatggtaaaacctctactaaagaaatctttactgaaaatacaaaaatccagtctctactaaaataagtctctactaaaaatacaaaaattagccaggcgtggtgctgcacacctgtaatatcagctactcgggaggctgaggcaggagactcgcttgatcccatgcagcggaggttgcagtgagccgagatcacgccattgcactccagcctgggcatcagaataagactccgtctcaaaaaaaaaaccacaaaaaaacaaaacaacaacaaaagaaaactagtgcttattcgtcactggccaagctgcccattggctacatgggtgcttcaaagagctgcccttctccaggtctggccagcaggtatgtgttacagcaaatgcctggggcagcggcaggggcattgctgcgggaagcttctggacttgcaggaaagctaagttctcagactgcaggggagctaagcacacctcggcacagggtgaggcctgcggttctcagacttcagtctttgtggagcttgagaaaaatgaggctttgcaggtcccacccctagagattctgctctatccactcttgaaggggatcgagaaatttgcattttgcaactcccactttcctccttgaaagctccggagattctgacgcagggttccgtgggccacactttggaaaatacagacccatgagatagaataccagactgttgaagtgtaacgggggcctgggaagtgcagtaacagaagcaagtttgagggtaaaggacacccagaggagggagggacagcatctgcatggagaggagaagagaccccccagcagcttccagggtgttggaagggtgcgctagtaactgctatgcatggcaggtggggaactgtacgtcagggcacagcagcatgaagcggtatggctcgtgtggacagctagggacaggcaggcgtggagcaggcatcctgttctgaaggccaaatcccacagaggagccagggtgctggcaggagccctgaactagccgaacagctgaacagctgaacattcaccctgtggggaaagggtcagaagcgtccaggcttgagggcacagctgggtctcgtcactgcatcacccttatttaggataaaggccctgaagaattgtattagaggttggcaaagcatatctaccacctcctggagccacgctggccgcagggattataattatttccattttcaaattaaggcctctgagctcagagaggggaagttacttgtctgaggccacacagcttgttggagcccatctcttgacccaaagactgtggagccgagttggccacctctctgggagcgggtattggatggtggttgatggttttccattgctttcctgggaaaggggtgtctctgtccctaagcaaaaaggcagggaggaagagatgcttccccagggcagccgtctgctgtagctgcgcttccaacctggcttccacctgcctaacccagtggtgagcctgggaatggacccacgggacaggcagcccccagggccttttctgaccccacccactcgagtcctggcttcactcccttccttccttcccaggtgaacctccaaaatcaggggatcgcagcggctacagcagccccggctccccaggcactcccggcagccgctcccgcaccccgtcccttccaaccccacccacccgggagcccaagaaggtggcagtggtccgtactccacccaagtcgccgtcttccgccaagagccgcctgcagacagcccccgtgcccatgccagacctgaagaatgtcaagtccaagatcggctccactgagaacctgaagcaccagccgggaggcgggaaggtgagagtggctggctgcgcgtggaggtgtggggggctgcgcctggaggggtagggctgtgcctggaagggtagggctgcgcctggaggtgcgcggttgagcgtggagtcgtgggactgtgcatggaggtgtggggctccccgcacctgagcacccccgcataacaccccagtcccctctggaccctcttcaaggaagttcagttctttattgggctctccactacactgtgagtgccctcctcaggcgagagaacgttctggctcttctcttgccccttcagcccctgttaatcggacagagatggcagggctgtgtctccacggccggaggctctcatagtcagggcacccacagcggttccccacctgccttctgggcagaatacactgccacccataggtcagcatctccactcgtgggccatctgcttaggttgggttcctctggattctggggagattgggggttctgttttgatcagctgattcttctgggagcaagtgggtgctcgcgagctctccagcttcctaaaggtggagaagcacagacttcgggggcctggcctggatccctttccccattcctgtccctgtgcccctcgtctgggtgcgttagggctgacatacaaagcaccacagtgaaagaacagcagtatgcctcctcactagccaggtgtgggcgggtgggtttcttccaaggcctctctgtggccgtgggtagccacctctgtcctgcaccgctgcagtcttccctctgtgtgtgctcctggtagctctgcgcatgctcatcttcttataagaacaccatggcagctgggcgtagtggctcacgcctataatcccagcactttgggaggctgaggcaggcagatcacgaggtcaggagttcgagaccaacctgaccaacagggtgaaacctcgtctctactaaaaatacaaaaatacctgggcgtggtggtggtgcgcgcctataatcccagctactcaggaggctgaggcaggagaatcgcttgaacccaggaggcagaggttgcagtgagccgagatagtgccactgcactccagtttgagcaacagagcgagactctgtctcaaaacaaaataaaacaaaccaaaaaaacccaccatggcttagggcccagcctgatgacctcatttttcacttagtcacctctctaaaggccctgtctccaaatagagtcacattctaaggtacgggggtgttggggaggggggttagggcttcaacatgtgaatttgcggggaccacaattcagcccaggaccccgctcccgccacccagcactggggagctggggaagggtgaagaggaggctgggggtgagaaggaccacagctcactctgaggctgcagatgtgctgggccttctgggcactgggcctcggggagctagggggctttctggaaccctgggcctgcgtgtcagcttgcctcccccacgcaggcgctctccacaccattgaagttcttatcacttgggtctgagcctggggcatttggacggagggtggccaccagtgcacatgggcaccttgcctcaaaccctgccacctccccccacccaggatcccccctgcccccgaacaagcttgtgagtgcagtgtcacatcccatcgggatggaaatggacggtcgggttaaaagggacgcatgtgtagaccctgcctctgtgcatcaggcctcttttgagagtccctgcgtgccaggcggtgcacagaggtggagaagactcggctgtgccccagagcacctcctctcatcgaggaaaggacagacagtggctcccctgtggctgtggggacaagggcagagctccctggaacacaggagggagggaaggaagagaacatctcagaatctccctcctgatggcaaacgatccgggttaaattaaggtccggccttttcctgctcaggcatgtggagcttgtagtggaagaggctctctggaccctcatccaccacagtggcctggttagagaccttggggaaataactcacaggtgacccagggcctctgtcctgtaccgcagctgagggaaactgtcctgcgcttccactggggacaatgcgctccctcgtctccagactttccagtcctcattcggttctcgaaagtcgcctccagaagccccatcttgggaccaccgtgactttcattctccagggtgcctggccttggtgctgcccaagaccccagaggggccctcactggcctttcctgccttttctcccattgcccacccatgcacccccatcctgctccagcacccagactgccatccaggatctcctcaagtcacataacaagcagcacccacaaggtgctcccttccccctagcctgaatctgctgctccccgtctggggttccccgcccatgcacctctgggggcccctgggttctgccataccctgccctgtgtcccatggtggggaatgtccttctctccttatctcttcccttcccttaaatccaagttcagttgccatctcctccaggaagtcttcctggattcccctctctcttcttaaagcccctgtaaactctgaccacactgagcatgtgtctgctgctccctagtctgggccatgagtgagggtggaggccaagtctcatgcatttttgcagcccccacaagactgtgcaggtggccggccctcattgaatgcggggttaatttaactcagcctctgtgtgagtggatgattcaggttgccagagacagaaccctcagcttagcatgggaagtagcttccctgttgaccctgagttcatctgaggttggcttggaaggtgtgggcaccatttggcccagttcttacagctctgaagagagcagcaggaatggggctgagcagggaagacaactttccattgaaggcccctttcagggccagaactgtccctcccaccctgcagctgccctgcctctgcccatgaggggtgagagtcaggcgacctcatgccaagtgtagaaaggggcagatgggagccccaggttatgacgtcaccatgctgggtggaggcagcacgtccaaatctactaaagggttaaaggagaaagggtgacttgacttttcttgagatattttgggggacgaagtgtggaaaagtggcagaggacacagtcacagcctcccttaaatgccaggaaagcctagaaaaattgtctgaaactaaacctcagccataacaaagaccaacacatgaatctccaggaaaaaagaaaaagaaaaatgtcatacagggtccatgcacaagagcctttaaaatgacccgctgaagggtgtcaggcctcctcctcctggactggcctgaaggctccacgagcttttgctgagacctttgggtccctgtggcctcatgtagtacccagtatgcagtaagtgctcaataaatgtttggctacaaaagaggcaaagctggcggagtctgaagaatccctcaaccgtgccggaacagatgctaacaccaaagggaaaagagcaggagccaagtcacgtttgggaacctgcagaggctgaaaactgccgcagattgctgcaaatcattgggggaaaaacggaaaacgtctgttttcccctttgtgcttttctctgttttcttctttgtgcttttctctgttttcaggatttgctacagtgaacatagattgctttggggccccaaatggaattattttgaaaggaaaatgcagataatcaggtggccgcactggagcaccagctgggtaggggtagagattgcaggcaaggaggaggagctgggtggggtgccaggcaggaagagcccgtaggccccgccgatcttgtgggagtcgtgggtggcagtgttccctccagactgtaaaagggagcacctggcgggaagagggaattcttttaaacatcattccagtgcccgagcctcctggacctgttgtcatcttgaggtgggcctcccctgggtgactctagtgtgcagcctggctgagactcagtggccctgggttcttactgctgacacctaccctcaacctcaaccactgcggcctcctgtgcaccctgatccagtggctcattttccactttcagtcccagctctatccctatttgcagtttccaagtgcctggtcctcagtcagctcagacccagccaggccagcccctggttcccacatcccctttgccaagctcatccccgccctgtttggcctgcgggagtgggagtgtgtccagacacagagacaaaggaccagcttttaaaacattttgttggggccaggtgtggtggctcacacctaatcccaacacctggggaggccaaggcagaaggatcacttgagtccaggagttcaagaccagcctgggcaacatagggagaccctgtctctacaattttttttttaattagctgggcctgttggcactctcctgtagttccagctactctagaggctgaggtgggaggactgcttgagcctgggaggtcagggctgcaatgagccatgttcacaccactgaacgccagcctgggcgagaccctgtatcaaaaaagtaaagtaaaatgaatcctgtacgttatattaaggtgccccaaattgtacttagaaggatttcatagttttaaatacttttgttatttaaaaaattaaatgactgcagcatataaattaggttcttaatggaggggaaaaagagtacaagaaaagaaataagaatctagaaacaaagataagagcagaaataaaccagaaaacacaaccttgcactcctaacttaaaaaaaaaaatgaagaaaacacaaccagtaaaacaacatataacagcattaagagctggctcctggctgggcgcggtggcgcatgcctgtaatcccaacactttgggaggccgatgctggaggatcacttgagaccaggagttcaaggttgcagtgagctatgatcataccactacaccctagcctgggcaacacagtgagactgagactctattaaaaaaaaaatgctggttccttccttatttcattcctttattcattcattcagacaacatttatggggcacttctgagcaccaggctctgtgctaagagcttttgcccccagggtccaggccaggggacaggggcaggtgagcagagaaacagggccagtcacagcagcaggaggaatgtaggatggagagcttggccaggcaaggacatgcagggggagcagcctgcacaagtcagcaagccagagaagacaggcagacccttgtttgggacctgttcagtggcctttgaaaggacagcccccacccggagtgctgggtgcaggagctgaaggaggatagtggaacactgcaacgtggagctcttcagagcaaaagcaaaataaacaactggaggcagctggggcagcagagggtgtgtgttcagcactaaggggtgtgaagcttgagcgctaggagagttcacactggcagaagagaggttggggcagctgcaagcctctggacatcgcccgacaggacagagggtggtggacggtggccctgaagagaggctcagttcagctggcagtggccgtgggagtgctgaagcaggcaggctgtcggcatctgctggggacggttaagcaggggtgagggcccagcctcagcagcccttcttggggggtcgctgggaaacatagaggagaactgaagaagcagggagtcccagggtccatgcagggcgagagagaagttgctcatgtggggcccaggctgcaggatcaggagaactggggaccctgtgactgccagcggggagaagggggtgtgcaggatcatgcccagggaagggcccaggggcccaagcatgggggggcctggttggctctgagaagatggagctaaagtcactttctcggaggatgtccaggccaatagttgggatgtgaagacgtgaagcagcacagagcctggaagcccaggatggacagaaacctacctgagcagtggggctttgaaagccttggggcggggggtgcaatattcaagatggccacaagatggcaatagaatgctgtaactttcttggttctgggccgcagcctgggtggctgcttccttccctgtgtgtattgatttgtttctcttttttgagacagagtcttgctgggttgcccaggctggagtgcagtggtgcgatcatagctcactgcagccttgaagtcctgagctcaagagatccttccacctcagcctcctgagtagttgggaccacaggcttgcaccacagtgcccaactaatttcttatattttttgtagagatggggtttcactgtgtcgcccaggatggtcttgaactcctgggctcaagtgatcctcctgcctcagcctcgcaaattgctgggattacaggtgtgagccaccatgcccgaccttctctttttaagggcgtgtgtgtgtgtgtgtgtgtgtgggcgcactctcgtcttcaccttcccccagccttgctctgtctctacccagtcacctctgcccatctctccgatctgtttctctctccttttacccctctttcctccctcctcatacaccactgaccattatagagaactgagtattctaaaaatacattttatttatttattttgagacagagtctcactctgtcacccaggctggagtgcagtggtgcaatctcggctcactgcaacctccgcctcccaggttgaagcaactctcctgcctcagcctccctagtagctgggattacaagcacacaccaccatgcctagcaaatttttatatttttagtagaggaggggtgtcaccatgtttgccaagctggtctcaaactcctggcctcaggtgatctgcctaccttggtctcccaaagtgctgggattacaggtgtgagccaccacgcctgcccttaaaaatacattatatttaatagcaaagccccagttgtcactttaaaaagcatctatgtagaacatttatgtggaataaatacagtgaatttgtacgtggaatcgtttgcctctcctcaatcagggccagggatgcaggtgagcttgggctgagatgtcagaccccacagtaagtggggggcagagccaggctgggaccctcctctaggacagctctgtaactctgagaccctccaggcatcttttcctgtacctcagtgcttctgaaaaatctgtgtgaatcaaatcattttaaaggagcttgggttcatcactgtttaaaggacagtgtaaataattctgaaggtgactctaccctgttatttgatctcttctttggccagctgacttaacaggacatagacaggttttcctgtgtcagttcctaagctgatcaccttggacttgaagaggaggcttgtgtgggcatccagtgcccaccccgggttaaactcccagcagagtattgcactgggcttgctgagcctggtgaggcaaagcacagcacagcgagcaccaggcagtgctggagacaggccaagtctgggccagcctgggagccaactgtgaggcacggacggggctgtggggctgtggggctgcaggcttggggccagggagggagggctgggctctttggaacagccttgagagaactgaacccaaacaaaaccagatcaaggtctagtgagagcttagggctgctttgggtgctccaggaaattgattaaaccaagtggacacacacccccagccccacctcaccacagcctctccttcagggtcaaactctgaccacagacatttctcccctgactaggagttccctggatcaaaattgggagcttgcaacacatcgttctctcccttgatggtttttgtcagtgtctatccagagctgaagtgtaatatatatgttactgtagctgagaaattaaatttcaggattctgatttcataatgacaaccattcctcttttctctcccttctgtaaatctaagattctataaacggtgttgacttaatgtgacaattggcagtagttcaggtctgctttgtaaatacccttgtgtctattgtaaaatctcacaaaggcttgttgccttttttgtggggttagaacaagaaaaagccacatggaaaaaaaatttcttttttgtttttttgtttgcttgtttttttgagacagagtttcactctgtcgcccaggctggagtgcagtggtgcgatctccgcccactgcaagctccacctcccgggttcatgctattctcctgtctcagcctcccaagtagctgggactgcaggtgcccgccaccacacctggctaatttttttgtatttttagtagagacggggtttcaccgtgttagccaggatggtctcaatctcctgacctcgtcatctgcctgcctcggcctcccaaagtgctgagattacaggcgtgagccaccgtgcccggccagaaaaaaacatttctaagtatgtggcagatactgaattattgcttaatgtcctttgattcatttgtttaatttctttaatggattagtacagaaaacaaagttctcttccttgaaaaactggtaagttttctttgtcagataaggagagttaaataacccatgacatttccctttttgcctcggcttccaggaagctcaaagttaaatgtaatgatcactcttgtaattatcagtgttgatgcccttcccttcttctaatgttactctttacattttcctgctttattattgtgtgtgttttctaattctaagctgttcccactcctttctgaaagcaggcaaatcttctaagccttatccactgaaaagttatgaataaaaaatgatcgtcaagcctacaggtgctgaggctactccagaggctgaggccagaggaccacttgagcccaggaatttgagacctgggctgggcagcatagcaagactctatctccattaaaactatttttttttatttaaaaaataatccgcaaagaaggagtttatgtgggattccttaaaatcggagggtggcatgaattgattcaaagacttgtgcagagggcgacagtgactccttgagaagcagtgtgagaaagcctgtcccacctccttccgcagctccagcctgggctgaggcactgtcacagtgtctccttgctggcaggagagaatttcaacattcaccaaaaagtagtattgtttttattaggtttatgaggctgtagccttgaggacagcccaggacaactttgttgtcacatagatagcctgtggctacaaactctgagatctagattcttctgtggctgcttctgacctgagaaagttgcggaacctcagcgagcctcacatggcctccttgtccttaacgtggggacggtgggcaagaaaggtgatgtggcactagagatttatccatctctaaaggaggagtggattgtacattgaaacaccagagaaggaattacaaaggaagaatttgagtatctaaaaatgtaggtcaggcgctcctgtgttgattgcagggctattcacaatagccaagatttggaagcaacccaagtgtccatcaacagacaaatggataaagaaaatgtggtgcatatacacaatggaatactattcagccatgaaaaagaatgagaatctgtcatttgaaacaacatggatggaactggaggacattatgttaagtgaaataagccagacagaaggacagacttcacatgttctcacacatttgtgggagctaaaaattaaactcatggagatagagagtagaaggatggttaccagaggctgaggagggtggaggggagcagggagaaagtagggatggttaatgggtacaaaaacgtagttagcatgcatagatctagtattggatagcacagcagggtgacgacagccaacagtaatttatagtacatttaaaaacaactaaaagagtgtaattggactggctaacatggtgaaaccccgtctctactaaaaatacaaaaattagctgggcatggtggctcacgcctgtaatcccagcactttgggaggccgaggcgggccgatcacgaggtcaggagatcgagaccatcctagctaacatggtgaaaccccgtctctactacaaatacaaaaaaaagaaaaaattagccgggcatggtggtgggcgcctgtagtcccagctactcgggaggctgaggcaggagaatggcgtgaacccgggaggcggagcttgcagtgagccgagatcgcgccactgcactccagcctgggcgacaaggcaagattctatctcaaaaaaataaaaataaaataaaataaaataataaaataaaataaaataaaataaaataaataaaataaaataaaatgtataattggaatgtttataacacaagaaatgataaatgcttgaggtgatagataccccattcaccgtgatgtgattattgcacaatgtatgtctgtatctaaatatctcatgtaccccacaagtatatacacctactatgtacccatataaatttaaaattaaaaaattataaaacaaaaataaataagtaaattaaaatgtaggctggacaccgtggttcacgcctgtaatcccagtgctttgtgaggctgaggtgagagaatcacttgagcccaggagtttgagaccggcctgggtgacatagcgagaccccatcatcacaaagaatttttaaaaattagctgggcgtggtagcacataccggtagttccagctacttgggagaccgaggcaggaggattgcttgagcccaggagtttaaggctgcagtgagctacgatggcgccactgcattccagcctgggtgacagagtgagagcttgtctctattttaaaaataataaaaagaataaataaaaataaattaaaatgtaaatatgtgcatgttagaaaaaatacacccatcagcaaaaagggggtaaaggagcgatttcagtcataattggagagatgcagaataagccagcaatgcagtttcttttattttggtcaaaaaaaataagcaaaacaatgttgtaaacacccagtgctggcagcaatgtggtgaggctggctctctcaccagggctcacagggaaaactcatgcaacccttttagaaagccatgtggagagttgtaccgagaggttttagaatatttataactttgacccagaaattctattctaggactctgtgttatgaaaataacccatcatatggaaaaagctcctttcagaaagaggttcatgggaggctgtttgtattttttttttctttgcatcaaatccagctcctgcaggactgtttgtattattgaagtacaaagtggaatcaatacaaatgttggatagcaggggaacaatattcacaaaatggaatgggacatagtattaaacatagtgcttctgatgaccgtagaccatagacaatgcttaggatatgatatcacttcttttgttgttttttgtattttgagacgaagtctcattctgtcacccaggctggagttcagtggcgccatctcagctcactgcaacctccatctcccgggttcaagctattctccttcctcaacctcccgagtagctgggttgcgcaccaccatgcctggctaacttttgtatttttagtacagacggggtttcaccacgttggccaggctgctcttgaactcctgacgtcaggtgatccaccagccttgacctcccaaagtgctaggattacaggagccactgtacccagcctaggatatgatatcacttcttagagcaagatacaaaattgcatgtgcacaataattctaccaagtataggtatacaggggtagttatatataaatgagacttcaaggaaatacaacaaaatgcaatcgtgattgtgttagggtggtaagaaaacggtttttgctttgatgagctctgttttttaaaatcgttatattttctaataaaaatacatagtcttttgaaggaacataaaagattatgaagaaatgagttagatattgattcctattgaagattcagacaagtaaaattaaggggaaaaaaaacgggatgaaccagaagtcaggctggagttccaaccccagatccgacagcccaggctgatggggcctccagggcagtggtttccacccagcattctcaaaagagccactgaggtctcagtgccattttcaagatttcggaagcggcctgggcacggctggtccttcactgggatcaccacttggcaattatttacacctgagacgaataaaaaccagagtgctgagattacaggcatggtggcttacgcttgtaatcggctttgggaagccgaggtgggctgattgcttgagcccaggagtttcaaactatcctggacaacatagcatgacctcgtctctacaaaaaatacaaaaaatttgccaggtgtggtggcatgtgcctgtggtcccagctacttgggaggctgaagtaggagaatcccctgagccctgggaagtcgaggctgcactgagccgtgatggtgtcactgcactccagcctgggtgacaaagtgagaccctatctcacaaagaaaaaaaacaaaacaaaaaacccaaagcacactgtttccactgtttccagagttcctgagaggaaaggtcaccgggtgaggaagacgttctcactgatctggcagagaaaatgtccagtttttccaactccctaaaccatggttttctatttcatagttcttaggcaaattggtaaaaatcatttctcatcaaaacgctgatattttcacacctccctggtgtctgcagaaagaaccttccagaaatgcagtcgtgggagacccatccaggccacccctgcttatggaagagctgagaaaaagccccacgggagcatttgctcagcttccgttacgcacctagtggcattgtgggtgggagagggctggtgggtggatggaaggagaaggcacagcccccccttgcagggacagagccctcgtacagaagggacaccccacatttgtcttccccacaaagcggcctgtgtcctgcctacggggtcagggcttctcaaacctggctgtgtgtcagaatcaccaggggaacttttcaaaactagagagactgaagccagactcctagattctaattctaggtcagggctaggggctgagattgtaaaaatccacaggtgattctgatgcccggcaggcttgagaacagccgcagggagttctctgggaatgtgccggtgggtctagccaggtgtgagtggagatgccggggaacttcctattactcactcgtcagtgtggccgaacacatttttcacttgacctcaggctggtgaacgctcccctctggggttcaggcctcacgatgccatccttttgtgaagtgaggacctgcaatcccagcttcgtaaagcccgctggaaatcactcacacttctgggatgccttcagagcagccctctatcccttcagctcccctgggatgtgactcaacctcccgtcactccccagactgcctctgccaagtccgaaagtggaggcatccttgcgagcaagtaggcgggtccagggtggcgcatgtcactcatcgaaagtggaggcgtccttgcgagcaagcaggcgggtccagggtggcgtgtcactcatccttttttctggctaccaaaggtgcagataattaataagaagctggatcttagcaacgtccagtccaagtgtggctcaaaggataatatcaaacacgtcccgggaggcggcagtgtgagtaccttcacacgtcccatgcgccgtgctgtggcttgaattattaggaagtggtgtgagtgcgtacacttgcgagacactgcatagaataaatccttcttgggctctcaggatctggctgcgacctctgggtgaatgtagcccggctccccacattcccccacacggtccactgttcccagaagccccttcctcatattctaggagggggtgtcccagcatttctgggtcccccagcctgcgcaggctgtgtggacagaatagggcagatgacggaccctctctccggaccctgcctgggaagctgagaatacccatcaaagtctccttccactcatgcccagccctgtccccaggagccccatagcccattggaagttgggctgaaggtggtggcacctgagactgggctgccgcctcctcccccgacacctgggcaggttgacgttgagtggctccactgtggacaggtgacccgtttgttctgatgagcggacaccaaggtcttactgtcctgctcagctgctgctcctacacgttcaaggcaggagccgattcctaagcctccagcttatgcttagcctgcgccaccctctggcagagactccagatgcaaagagccaaaccaaagtgcgacaggtccctctgcccagcgttgaggtgtggcagagaaatgctgcttttggcccttttagatttggctgcctcttgccaggagtggtggctcgtgcctgtaattccagcactttgggagactaaggcgggaggttcgcttgagcccaggagttcaagaccagcctgggcaacaatgagacccctgtgtctacaaaaagaattaaaattagccaggtgtggtggcacgcacctgtagtcccagctacttgggaggctgaggtgggaggattgcctgagtccgggaggcggaagttgcaaggagccatgatcgcgccactgcacttcaacctaggcaacagagtgagactttgtctcaaaaaacaatcatataataattttaaaataaatagatttggcttcctctaaatgtccccggggactccgtgcatcttctgtggagtgtctccgtgagattcgggactcagatcctcaagtgcaactgacccacccgataagctgaggcttcatcatcccctggccggtctatgtcgactgggcacccgaggctcctctcccaccagctctcttggtcagctgaaagcaaactgttaacaccctggggagctggacgtatgagacccttggggtgggaggcgttgatttttgagagcaatcacctggccctggctggcagtaccgggacactgctgtggctccggggtgggctgtctccagaaaatgcctggcctgaggcagccacccgcatccagcccagagggtttattcttgcaatgtgctgctgcttcctgccctgagcacctggatcccggcttctgccctgaggccccttgagtcccacaggtagcaagcgcttgccctgcggctgctgcatggggctaactaacgcttcctcaccagtgtctgctaagtgtctcctctgtctcccacgccctgctctcctgtccccccagtttgtctgctgtgaggggacagaagaggtgtgtgccgcccccacccctgcccgggcccttgttcctgggattgctgttttcagctgtttgagctttgatcctggttctctggcttcctcaaagtgagctcggccagaggaggaaggccatgtgctttctggttgaagtcaagtctggtgccctggtggaggctgtgctgctgaggcggagctggggagagagtgcacacgggctgcgtggccaacccctctgggtagctgatgcccaaagacgctgcagtgcccaggacatctgggacctccctggggcccgcccgtgtgtcccgcgctgtgttcatctgcgggctagcctgtgacccgcgctgtgctcgtctgcgggctagcctgtgtcccgcgctctgcttgtctgcggtctagcctgtgacctggcagagagccaccagatgtcccgggctgagcactgccctctgagcaccttcacaggaagcccttctcctggtgagaagagatgccagcccctggcatctgggggcactggatccctggcctgagccctagcctctccccagcctgggggccccttcccagcaggctggccctgctccttctctacctgggacccttctgcctcctggctggaccctggaagctctgcagggcctgctgtccccctccctgccctccaggtatcctgaccaccggccctggctcccactgccatccactcctctcctttctggccgttccctggtccctgtcccagcccccctccccctctcacgagttacctcacccaggccagagggaagagggaaggaggccctggtcataccagcacgtcctcccacctccctcggccctggtccaccccctcagtgctggcctcagagcacagctctctccaagccaggccgcgcgccatccatcctccctgtcccccaacgtccttgccacagatcatgtccgccctgacacacatgggtctcagccatctctgccccagttaactccccatccataaagagcacatgccagctgacaccaaaataattcgggatggttccagtttagacctaagtggaaggagaaaccaccacctgccctgcaccttgttttttggtgaccttgataaaccatcttcagccatgaagccagctgtctcccaggaagctccagggcggtgcttcctcgggagctgactgataggtgggaggtggctgcccccttgcaccctcaggtgaccccacacaaggccactgctggaggccctggggactccaggaatgtcaatcagtgacctgccccccaggccccacacagccatggctgcatagaggcctgcctccaagggacctgtctgtctgccactgtggagtccctacagcgtgccccccacaggggagctggttctttgactgagatcagctggcagctcagggtcatcattcccagagggagcggtgccctggaggccacaggcctcctcatgtgtgtctgcgtccgctcgagcttactgagacactaaatctgttggtttctgctgtgccacctacccaccctgttggtgttgctttgttcctattgctaaagacaggaatgtccaggacactgagtgtgcaggtgcctgctggttctcacgtccgagctgctgaactccgctgggtcctgcttactgatggtctttgctctagtgctttccagggtccgtggaagcttttcctggaataaagcccacgcatcgaccctcacagcgcctcccctctttgaggcccagcagataccccactcctgcctttccagcaagatttttcagatgctgtgcatactcatcatattgatcacttttttcttcatgcctgattgtgatctgtcaatttcatgtcaggaaagggagtgacatttttacacttaagcgtttgctgagcaaatgtctgggtcttgcacaatgacaatgggtccctgtttttcccagaggctcttttgttctgcagggattgaagacactccagtcccacagtccccagctcccctggggcagggttggcagaatttcgacaacacatttttccaccctgactaggatgtgctcctcatggcagctgggaaccactgtccaataagggcctgggcttacacagctgcttctcattgagttacacccttaataaaataatcccattttatcctttttgtctctctgtcttcctctctctctgcctttcctcttctctctcctcctctctcatctccaggtgcaaatagtctacaaaccagttgacctgagcaaggtgacctccaagtgtggctcattaggcaacatccatcataaaccaggtagccctgtggaaggtgagggttgggacgggagggtgcagggggtggaggagtcctggtgaggctggaactgctccagacttcagaaggggctggaaaggatattttaggtagacctacatcaaggaaagtgttgagtgtgaaacttgcgggagcccaggaggcgtggtggctccagctcgctcctgcccaggccatgctgcccaagacaaggtgaggcgggagtgaagtgaaataaggcaggcacagaaagaaagcacatattctcggccgggcgctgtggctcacgcctgtaattccagcactttgggaggccaaggtgggtggatcatgaggtcaggagattgagaccatcctggctaacacagtgaaaccccgtctctactaaaaatacaaaaaattagccgggcgtggtggtgggcgcctgtagtcccagctactccggaggctgaggcaggaaaatggcgtgaacccggaaggcggagcttgcagtgagcggagtgagcagagatcgcgccactgcactccagcctgggcgacagagcgagactccgtctcaaaaaaaaaaagcacatgttctcgcttctttgtgggatccaggagatagagaatagaaggatggttaccagaggctgggaagggtagtgaggggatggtggggggatggtcaatgggtacaaaaaaaatagaataagacctagtatttgatagtgcaacagggtgactatagtcaataataatttaattgtacatttaaaaataactaaaagatagccgggtgcagtggcttacgtctgtaatcccagtactttgggaggctgaggtgggcgtttgagaccagcctggccaacatggtgaaaccccatctctactaaaaatacaaaaattagccaggcatggtggcgggcgcctgtaatcccagctactcgggaggctgaggcaggagaatcacttgaacctgggaggcagaggttgcagtgagccgagatcttgccactgcactccagcctgggtgacagtgaaactccgtctcaaaaataaaaataaaaatacagctgggcacggtggctcacgcctgtaatcccagcactttgggaggccgaggcgagcggatcacaaggtcaggagatatagaccatcctggctaacacggtgaaacccggtctctactaaaaatacaaaaaattagccaggcgtggtggcaggtgcctatagtcccagctactcacaaggctgaggcaggagaatggcatgaacctgggaggcggagcttgcagtgagccgagattgtgccactgcactccagcctgggcgagagagtgagactccgtctcaaaacaaaaacaaaaacaaaaacaaaaacaaacacacaacaaaaacctaaaagaatataaatggattgtttgtaacacaaaggacaaatgtttgaggggatggataccccattttccatgatgtgattattatacattgtgtgtctgtatcaaaacatctcatgagccccataaatatatacacctaactatgtacccacaaaaattaaaaaaatatattttttaaggtgaagagggaggcgagatgctggccttaacccctaacccgttgttctccctgcaagctgtccacagggcctctcagactcgaggttcagctatatggatgcatgagcttggtccccagccaacatgggagacacttcaccatcggcagcagctacagcacaggaaccctgggtcactgccatgtcccctctgtgactttgtttaaacagaaaatgatgctctgggccggctgtggtggcccacacctataatcccagcaccttgggaggcgggggtgggcagattgcctgaggtcaggagttggagatcagcctggccgacatggcgaaaccccatgtctactaaaaatacaaaaactagccaggcatggtggcacatgcctgtaatcccagctacttgggaggctgaagcaggagaatcacttgaacccaggaggcagaggctgagtgagccaagatcgtgccaatgcactccagcttgggtgagggagtgagactccgtctcaaaaaaaaaaaaaaagaaagaaaaagaaaagaaagtgatcctactggaaccatgcttactcccctccccacctcacactgtgtagaaattagtgctgtcggccaggcgcggtggctcatgcctgtaatcgcagcactttgggaggccaaggcaggcggatcacgaggtcaggagatcaagaccatcctggctaacacagtgaaaccctgtctctactaaaaatacaaaaaattagccgggcatggtggcaggcacctgtagtcccaactacttgggaggctgaggcaggagaatggcatgaacctgggaggcggagcttgcagtgagccaagatcgcgccactgcataccagcctaggtgacagagtgagactcagcaaaaaaagaaagaaagaaagaaagaaatcagtgctgtctatacttctttctgcagtgatggaaatattctgtatctgtgctgtccagtatagtagccactagctacatgtggcacttgaaacatggctggtacagttgaggaagagtggctgccatatcggacgacacagctatagattctgtcaccccaccccgagagtccagagcggggacttctgccttaggccctattcagggctgatttttacttgaacccttactgtgggaagagaaggccatgagaagttcagtctagaatgtgactccttattttctggctcccttggacactttgtgggatttagtctccctgtggaaagtattccacaagtggtgccaccaccccagctgtgagagcagctgggagctgcttttgtcatctttccctggaaagtcctgtgggctgtctcttcctcatgccttgtcccatgcttgggcatggtgtcaagcgtcaggagggagaaagggtccttatttatttatttagagagggacccttcttctgttcccaggctggagtgcagtggtgcgatctcggctcactgcaacctccgcctcctgggttcaagtgattctcctgcctcagcctcctgagtagctgagattacaggcacatgccaacatgcctggctaattttttttttttttttttttttttttttttgagatggagttgtactctcattgcccaggctggaatgtaatggcacaatctcggctcactgcaacctccacctcctggattcaagcaattctcctgtctcagcttcccaagtagctgggattacaggtgcccgccaccatgctcaactaatttttgtattttttttttagtagagacgaggtttcaccatgttggtcagactggtctcaaactcctgacctcaggtgatccacctgcctcggcctcccaaagtgctaggattacaggcatgagccaccacgcccggcctgaaagggttcttatttagtgtgcattttgacattcaatttaattccaaggtcttgtggggtcatggtttacaggatgttgatatagaaaagacttcacttaatgggccgggcgcagtggctcatgcctgtaatcccagcactttgggaggccgaggcaggcagatcaggaggtcaggagattgagaccatcctggctaacacagtgaaaccccatctctactgaaaatacaaaaaattagctgggcgtggtggcaggcacctgtagtcccagccactcggttggctgaggcaggagaatggcatgaacccgggaggcggagcttgcagtgagcagagaccatgccactgcactccagcctgggcgacagagcaagactctgtctcaagaaaaaaaaaaaaaaaacagactttacttactggaagccaaccaatgtatatttagagtaatttttcctgggctgagctgtcatttacttttgcagtatctcaagaagaagagtttacagtgtaaatatttgatgcacactttgattatatagatgaagcaaactattttcaagagctttgcaaggacttacttgtatccaaacaccattctaaaggagtcttacctacttctaaaggctggtctctacttggaaccacttgcttggccctggttcaagtcctgctgcaaacctggaagtcctgtcattgtcttcttccctccagagcagtggcacccaatctaatttttgctgtgccccagcagcccctggcactttgccctgtagactgcagacctcatgtaatgtatgttaagtccacagaaccacagaagatgatggcaagatgctcttgtgtgtgttgtgttctaggaggtggccaggtggaagtaaaatctgagaagcttgacttcaaggacagagtccagtcgaagattgggtccctggacaatatcacccacgtccctggcggaggaaataaaaaggtaaagggggtagggtgggttggatgctgcccttgggtatatgggcattaatcaagttgagtggacaaaggctggtccagttcccagaggaggaaaacagaggcttctgtgttgactggctggatgtgggccctcagcagcatccagtgggtctccactgcctgtctcaatcacctggagctttagcacgtttcacacctgggccccaacctggagaggctgaccaatgggtctcaggggcagctcggttgctggagtttttgtttttatttatttttatgtatttaaggcagggtctctgtattagtccattctcacactgctaataaagacatacccaagactgggtaatttataaaggaaagaggtttaatggactcacagttccacatggctggggaggcctcaaaatcatggcggaaggcaaaggagaagcaaaggcatttcttacatggcgacaggcaagagagcgtgtgcaggggaactcccatttataaaaccatcagacctcatgagatttattcactatcatgagaacagcatgggaaagacccgcccccatgattcagttacctcccactgggtccctcccatgacacatggaattatgggagctacaattcaagatgagatttgggtggggacacagccaaaccatatcagtctccctctgtcatccaggctggagtgcactggcatgatctcggctcactgcagcctctacctccctgggtcaggtgatcttcccacctcagcctcccaggtagctggaactacaggtacctgccactatgcctggctaaatattttgtatttcctgtggagacgaggttttgccacgttgcccaggctggtcttgaactcctgaggtcaagcaatatgcccacctcggcctcccaaggtgctgggattacaggtgtgagccacagtgctcggcctaagtcactgcagtttttaaagctcccaggtgattcttcagtgcagtcaaaagtgagaactggctgggtgcggtggctcatgcctgtaatcccagcaccttgggaggcgaaggtgggcagatggcttgaggtcaggagttcaagaccagcctggccaacatggtaaaaccccatctctactaaaaatacaaaagttagctgggtgtggtggtgcgtgcctgtaatcccagctacttgggaggctgaggcatgagaattgcttgaacccaggggacagaggttgtagtgagccgagatcgtgccactgcactccagcctgggcaacagagtgagattccatctcacaaaaaaaaaaaaaaaagcgagaaccactgtcctaggccctgatgtttgcaggcaactaaaaaaggaagtggacatccccagtcagctgtggcgcaccaagaacaagtcatgggaacataacctaattttctaaatgggttactaggcacttagagcaaaacaatgatgccgaaatcctgatttcagcaaagcctctgcctgcctgtcttggaagtatccacatgaggctgctggggccttggtgtccccagcagtttctagtctctaggtcttgctgtgggtgtctgtgcagtgagggtgtgtgtggcgctgggtgagctctgtctaggcctggcacaggatgcggtctggtagctgctgcttctcttctgcagaagcgcagccaagcaccctctggggtttcaggcccacacccagcctgaagttctgggagtggctcactttccaaccttcagggtctcccagcagctgactggggagtggtggagggaaaagggattgtattagtccgttttcacgccgctgatgaagacatacccgatactgggcagtctaaaagatagaggtctgatggactcacagttccacgtgactggggaggcctgacaatcatggtggaaggtgaaaggcttgtctcacacggtggcagacaagagaaaagagcttgtgcaggggaactcccctttataaaaccatcagatctcgggagacttattcactatcatgagaacagcacgggaaagaccctcctctatgattcaattacctcccaccaggtccctcccacaacatgtaggaattgtgggaactacaattcaagatgacatttgggtggggacacagccaaaccatatcagggcgtcccagaaagggtatagggtctgagacccaagtcagcatgagaaagtatgcttctcatggtggcccagttgggtggaagtggcagccgggccgtctttccaccaggccactcaagtagcagctgagagacccctgccctggccagtccccgccctcccctcttgccactgcctctggttctgaacagatgggcaccctcatcttgtatttgtgattaatgtctaacaatgtagttttgtgagaagggtttgctgatacagccttgctgcagatgctgcgaactgtggcctggggcagaccttacctccagacacgccctgaggcaggggagggcactggcccgtagctggccgagagctctcgggttgcgcgacagggatacttttcagcggctgggtcgctatccaaagtgagaaaacgaggagggaccaggaggctgtccgcctcaagagatgtgggggccaggtccagttatctggggaagcagtaagcttctctgctgtttctaaccccaggcctcccctggtctaaggcagggcctcccagcctcggggcactttaaagatatctgggcctggccccatccccacagtctgactgagtgggtctggatagggcctgagcattggtgatttcctgggtgaaaggaggcccctcacagtctctggaagcttctctgtgttaggaaaagctctgggcttgactctgctttgaaagtcaagatccgcaaatcctctcagcctcagtttctccttcagcaagatgaaatggaaatgctgtacctacgtcccggggtggttgtgagacccaaaaaagacaatgttctggaaggttcctggtgcgttgcagtcctctaagaacctgagttagagccacgctgagtctcagcttcttggctccttctgtttcaaactcgtccatgtgatagctcaggaagggtaggcagggccctgccccctactcagaaaacaccatcctggtcctggggatccccgcagcattagtcccctgttttcccagtgtattgagaaaaattgctaacaagcagtggggcacaccaccagcctcctgggttcctttcagtttggggatttttggacattcccaggaatgtcttaaaaaacacttcaaaaaacattaacataaatatttttatcaaagcctgtattaaatggtctttcaagaaaatacagtaacaggtcaggcatggtggctcatgcctgtaaccccagcactttgggaggccaaggcaggcagatcacctgaaatcaggagttcaagaccaacctggccaacacagccaaatcccatctctacaaaaaatacaaaaattagctgggtgtggtggcacacacctgtagtcccagctacttgggaggccgaggcaggagaattgcttgatcccggaggcggaggttgcagtgagctgagatcgtgccactgcactccagcgtgggtgacaaggtgaatctttgtctcaaaaaaaaaaaaaaaaaaaagataaaatacagtatacagtaatagagaacaatccttttttcaaagtagtgaccccaaatgaacaaaatatgcatctagcttaaatgcgaacctggttttctctacgcccattcaagcccctgcaataggggcccttcaccccgcatccatggactcctaaaattatatggaaaatggctgtgtgtgagtgtggatggacatgtgcacacatatttttggctttaccagatgctcaaagagcctaggacccaaaaagggctgagaatgaccgtgtcggccacttcagggtcatcaggaattgctgtgcactgctcacttctccagtgaacactttctgcttctgtgtttcctggtatcctttgggactcctggctaggtcatgtgtttctctactttcaaaagggcttcagccaggcacgatggcatgagcctgtagtcccagttgctctggaggttaaggtgggaagattgcttgagcccaggaatttgaggccagcctgggcaagtagataggtagatgattgatagatagatagatagataaatagatggatagataagtcgctagacagtcatccatccacccatccacacataaaaaggcctttgtcatgtcatgttttgtggcccacctgccagtgttgcccacagttgctgcccctccaaactcatcagtcactggcaaacaggaggaatgtgtggctcatgtctgggcatcagtggctgtgggagacatccttgatcttctccagcttctccttccacattttcctttgcaatctggcaatatctattaaaataaaatgtgcatgccttttgacctaagagcttcacttctaggacccacttacacgtgtgtgacatgatgttcatacgggtttatttatctgaggttgttcatacacaccattgcctgtaatcactaaaggcgggagcagcctacacatccatccacagaggagtagatgccttttggtacatccgtggcgacggaatactaagcagcctgtgtatctatacactcacacgtgtttgtttatgtgtggaatatctctggagggtacacaagaaacttaaaatgatcactgtctctggggagggtacctgggtgcctgggaggcaggtcagggaaggagtgggcacaggtattaccaattggaagacaataaaaacaacagctcctggccaggcgcagtggctcacgcctgtaatggcagcactctgagaggctgaggcgggcagattgcttgcgtccaggagttcaagaccagcctgggcaacatagcaaaaccccgtttctattaaaaatacaaaaaattagccaggtgtggtggcatgcacctgtaatcccagctactcgggaggctgaggtgggagaatcacctgagcctgggaggtcaaggctgcagtgaggtgagattgtgccaccgcactctagcctgggcgatagagcaagaccctgtctcaaaaacaaacaaaaaacagtccctggcactctgggccaggcctggcagggcagttggcagggctggtctttctctggcacttcatctcaccctccctcccttcctcttcttgcagattgaaacccacaagctgaccttccgcgagaacgccaaagccaagacagaccacggggcggagatcgtgtacaagtcgccagtggtgtctggggacacgtctccacggcatctcagcaatgtctcctccaccggcagcatcgacatggtagactcgccccagctcgccacgctagctgacgaggtgtctgcctccctggccaagcagggtttgtgatcaggcccctggggcggtcaataattgtggagaggagagaatgagagagtgtggaaaaaaaaagaataatgacccggcccccgccctctgcccccagctgctcctcgcagttcggttaattggttaatcacttaacctgcttttgtcactcggctttggctcgggacttcaaaatcagtgatgggagtaagagcaaatttcatctttccaaattgatgggtgggctagtaataaaatatttaaaaaaaaacattcaaaaacatggccacatccaacatttcctcaggcaattccttttgattcttttttcttccccctccatgtagaagagggagaaggagaggctctgaaagctgcttctgggggatttcaagggactgggggtgccaaccacctctggccctgttgtgggggtgtcacagaggcagtggcagcaacaaaggatttgaaacttggtgtgttcgtggagccacaggcagacgatgtcaaccttgtgtgagtgtgacgggggttggggtggggcgggaggccacgggggaggccgaggcaggggctgggcagaggggagaggaagcacaagaagtgggagtgggagaggaagccacgtgctggagagtagacatccccctccttgccgctgggagagccaaggcctatgccacctgcagcgtctgagcggccgcctgtccttggtggccgggggtgggggcctgctgtgggtcagtgtgccaccctctgcagggcagcctgtgggagaagggacagcgggtaaaaagagaaggcaagctggcaggagggtggcacttcgtggatgacctccttagaaaagactgaccttgatgtcttgagagcgctggcctcttcctccctccctgcagggtagggggcctgagttgaggggcttccctctgctccacagaaaccctgttttattgagttctgaaggttggaactgctgccatgattttggccactttgcagacctgggactttagggctaaccagttctctttgtaaggacttgtgcctcttgggagacgtccacccgtttccaagcctgggccactggcatctctggagtgtgtgggggtctgggaggcaggtcccgagccccctgtccttcccacggccactgcagtcaccccgtctgcgccgctgtgctgttgtctgccgtgagagcccaatcactgcctatacccctcatcacacgtcacaatgtcccgaattcccagcctcaccaccccttctcagtaatgaccctggttggttgcaggaggtacctactccatactgagggtgaaattaagggaaggcaaagtccaggcacaagagtgggaccccagcctctcactctcagttccactcatccaactgggaccctcaccacgaatctcatgatctgattcggttccctgtctcctcctcccgtcacagatgtgagccagggcactgctcagctgtgaccctaggtgtttctgccttgttgacatggagagagccctttcccctgagaaggcctggccccttcctgtgctgagcccacagcagcaggctgggtgtcttggttgtcagtggtggcaccaggatggaagggcaaggcacccagggcaggcccacagtcccgctgtcccccacttgcaccctagcttgtagctgccaacctcccagacagcccagcccgctgctcagctccacatgcatagtatcagccctccacacccgacaaaggggaacacacccccttggaaatggttcttttcccccagtcccagctggaagccatgctgtctgttctgctggagcagctgaacatatacatagatgttgccctgccctccccatctgcaccctgttgagttgtagttggatttgtctgtttatgcttggattcaccagagtgactatgatagtgaaaagaaaaaaaaaaaaaaaaaaggacgcatgtatcttgaaatgcttgtaaagaggtttctaacccaccctcacgaggtgtctctcacccccacactgggactcgtgtggcctgtgtggtgccaccctgctggggcctcccaagttttgaaaggctttcctcagcacctgggacccaacagagaccagcttctagcagctaaggaggccgttcagctgtgacgaaggcctgaagcacaggattaggactgaagcgatgatgtccccttccctacttccccttggggctccctgtgtcagggcacagactaggtcttgtggctggtctggcttgcggcgcgaggatggttctctctggtcatagcccgaagtctcatggcagtcccaaaggaggcttacaactcctgcatcacaagaaaaaggaagccactgccagctggggggatctgcagctcccagaagctccgtgagcctcagccacccctcagactgggttcctctccaagctcgccctctggaggggcagcgcagcctcccaccaagggccctgcgaccacagcagggattgggatgaattgcctgtcctggatctgctctagaggcccaagctgcctgcctgaggaaggatgacttgacaagtcaggagacactgttcccaaagccttgaccagagcacctcagcccgctgaccttgcacaaactccatctgctgccatgagaaaagggaagccgcctttgcaaaacattgctgcctaaagaaactcagcagcctcaggcccaattctgccacttctggtttgggtacagttaaaggcaaccctgagggacttggcagtagaaatccagggcctcccctggggctggcagcttcgtgtgcagctagagctttacctgaaaggaagtctctgggcccagaactctccaccaagagcctccctgccgttcgctgagtcccagcaattctcctaagttgaagggatctgagaaggagaaggaaatgtggggtagatttggtggtggttagagatatgcccccctcattactgccaacagtttcggctgcatttcttcacgcacctcggttcctcttcctgaagttcttgtgccctgctcttcagcaccatgggccttcttatacggaaggctctgggatctcccccttgtggggcaggctcttggggccagcctaagatcatggtttagggtgatcagtgctggcagataaattgaaaaggcacgctggcttgtgatcttaaatgaggacaatccccccagggctgggcactcctcccctcccctcacttctcccacctgcagagccagtgtccttgggtgggctagataggatatactgtatgccggctccttcaagctgctgactcactttatcaatagttccatttaaattgacttcagtggtgagactgtatcctgtttgctattgcttgttgtgctatggggggaggggggaggaatgtgtaagatagttaacatgggcaaagggagatcttggggtgcagcacttaaactgcctcgtaacccttttcatgatttcaaccacatttgctagagggagggagcagccacggagttagaggcccttggggtttctcttttccactgacaggctttcccaggcagctggctagttcattccctccccagccaggtgcaggcgtaggaatatggacatctggttgctttggcctgctgccctctttcaggggtcctaagcccacaatcatgcctccctaagaccttggcatccttccctctaagccgttggcacctctgtgccacctctcacactggctccagacacacagcctgtgcttttggagctgagatcactcgcttcaccctcctcatctttgttctccaagtaaagccacgaggtcggggcgagggcagaggtgatcacctgcgtgtcccatctacagacctgcagcttcataaaacttctgatttctcttcagctttgaaaagggttaccctgggcactggcctagagcctcacctcctaatagacttagccccatgagtttgccatgttgagcaggactatttctggcacttgcaagtcccatgatttcttcggtaattctgagggtggggggagggacatgaaatcatcttagcttagctttctgtctgtgaatgtctatatagtgtattgtgtgttttaacaaatgatttacactgactgttgctgtaaaagtgaatttggaaataaagttattactctgattaaataaggtctccattcatggattccaaggacaagaaagtcatatagaatgtctattttttaagttctttcccacgcacccttagataatttagctcagaacaggaaatgatagtattaataaaagctggacatcaggattaacagctctctctggggccctgaaggtgagagttctcagacttgctcatttgcagttgcttctttgtgatgctggcaaaccatcctagtcccattcaaagggcaatacaaagccttgtggctgacctcacgatgcagcactcagtttgcaagaccggcaccagtgtatgcaaacctgagaaggttggggatgaggatatgggatctttcatccctggaaatttagtccagaggcctggggctggagcagaacaccaagccaatcagcttaatgaatggcttagattcctgctaggtttgcagagctgccttctttcctttggtaccttattatagattgaggagtatttctgctaaaccaagatagggataaccagatagcatcttcatagcaatgccacaaaggaaaacaaaaacaaaacagtaatccatcatattattccttagtaactatgccaaggtcatgatactgaatccttagattgtttcaaaatactacttttctttgctcttcctgatgtgtttgccaccgcaggcagatgtttaagtaaaacagattttaactgcagctacaaaagcagcaacaggccagcaaaagagaagtgctatctcagagagcatggctttcagagccacaagagacagcctcactggctgtttcagcttgactgccatgcaaagaagagagcagagggagaaccagccccacccacttattcatcttgtacaaaaaaaaagcacctaccagcctaggctacatagtgagacactatctccacaaaaaacccacgaaaactagctgggtatggtggcacatgcctacagtcccagctactggtaaggctgtggtgggaggatctcttgaggccaggaaggagatccaggctgcagtgagccaagattgcaccactgcactccagtctggacaatcgagcaagatcccatctcaaacaataaaaaaaaaaagcgtgtaacctcctcagaagaaagatgttataatctcaggcagca

SEQ ID NO: 84 - RNA, 6816 nt, Homo sapiens
  source 1..6816: mol_type = mRNA
ggacggccgagcggcagggcgctcgcgcgcgcccactagtggccggaggagaaggctcccgcggaggccgcgctgcccgccccctcccctggggaggctcgcgttcccgctgctcgcgcctgcgccgcccgccggcctcaggaacgcgccctcttcgccggcgcgcgccctcgcagtcaccgccacccaccagctccggcaccaacagcagcgccgctgccaccgcccaccttctgccgccgccaccacagccaccttctcctcctccgctgtcctctcccgtcctcgcctctgtcgactatcaggtgaactttgaaccaggatggctgagccccgccaggagttcgaagtgatggaagatcacgctgggacgtacgggttgggggacaggaaagatcaggggggctacaccatgcaccaagaccaagagggtgacacggacgctggcctgaaagaatctcccctgcagacccccactgaggacggatctgaggaaccgggctctgaaacctctgatgctaagagcactccaacagcggaagatgtgacagcacccttagtggatgagggagctcccggcaagcaggctgccgcgcagccccacacggagatcccagaaggaaccacagctgaagaagcaggcattggagacacccccagcctggaagacgaagctgctggtcacgtgacccaagagcctgaaagtggtaaggtggtccaggaaggcttcctccgagagccaggccccccaggtctgagccaccagctcatgtccggcatgcctggggctcccctcctgcctgagggccccagagaggccacacgccaaccttcggggacaggacctgaggacacagagggcggccgccacgcccctgagctgctcaagcaccagcttctaggagacctgcaccaggaggggccgccgctgaagggggcagggggcaaagagaggccggggagcaaggaggaggtggatgaagaccgcgacgtcgatgagtcctccccccaagactcccctccctccaaggcctccccagcccaagatgggcggcctccccagacagccgccagagaagccaccagcatcccaggcttcccagcggagggtgccatccccctccctgtggatttcctctccaaagtttccacagagatcccagcctcagagcccgacgggcccagtgtagggcgggccaaagggcaggatgcccccctggagttcacgtttcacgtggaaatcacacccaacgtgcagaaggagcaggcgcactcggaggagcatttgggaagggctgcatttccaggggcccctggagaggggccagaggcccggggcccctctttgggagaggacacaaaagaggctgaccttccagagccctctgaaaagcagcctgctgctgctccgcgggggaagcccgtcagccgggtccctcaactcaaagctcgcatggtcagtaaaagcaaagacgggactggaagcgatgacaaaaaagccaagacatccacacgttcctctgctaaaaccttgaaaaataggccttgccttagccccaaacaccccactcctggtagctcagaccctctgatccaaccctccagccctgctgtgtgcccagagccaccttcctctcctaaatacgtctcttctgtcacttcccgaactggcagttctggagcaaaggagatgaaactcaagggggctgatggtaaaacgaagatcgccacaccgcggggagcagcccctccaggccagaagggccaggccaacgccaccaggattccagcaaaaaccccgcccgctccaaagacaccacccagctctgcgactaagcaagtccagagaagaccaccccctgcagggcccagatctgagagaggtgaacctccaaaatcaggggatcgcagcggctacagcagccccggctccccaggcactcccggcagccgctcccgcaccccgtcccttccaaccccacccacccgggagcccaagaaggtggcagtggtccgtactccacccaagtcgccgtcttccgccaagagccgcctgcagacagcccccgtgcccatgccagacctgaagaatgtcaagtccaagatcggctccactgagaacctgaagcaccagccgggaggcgggaaggtgcagataattaataagaagctggatcttagcaacgtccagtccaagtgtggctcaaaggataatatcaaacacgtcccgggaggcggcagtgtgcaaatagtctacaaaccagttgacctgagcaaggtgacctccaagtgtggctcattaggcaacatccatcataaaccaggaggtggccaggtggaagtaaaatctgagaagcttgacttcaaggacagagtccagtcgaagattgggtccctggacaatatcacccacgtccctggcggaggaaataaaaagattgaaacccacaagctgaccttccgcgagaacgccaaagccaagacagaccacggggcggagatcgtgtacaagtcgccagtggtgtctggggacacgtctccacggcatctcagcaatgtctcctccaccggcagcatcgacatggtagactcgccccagctcgccacgctagctgacgaggtgtctgcctccctggccaagcagggtttgtgatcaggcccctggggcggtcaataattgtggagaggagagaatgagagagtgtggaaaaaaaaagaataatgacccggcccccgccctctgcccccagctgctcctcgcagttcggttaattggttaatcacttaacctgcttttgtcactcggctttggctcgggacttcaaaatcagtgatgggagtaagagcaaatttcatctttccaaattgatgggtgggctagtaataaaatatttaaaaaaaaacattcaaaaacatggccacatccaacatttcctcaggcaattccttttgattcttttttcttccccctccatgtagaagagggagaaggagaggctctgaaagctgcttctgggggatttcaagggactgggggtgccaaccacctctggccctgttgtgggggtgtcacagaggcagtggcagcaacaaaggatttgaaacttggtgtgttcgtggagccacaggcagacgatgtcaaccttgtgtgagtgtgacgggggttggggtggggcgggaggccacgggggaggccgaggcaggggctgggcagaggggagaggaagcacaagaagtgggagtgggagaggaagccacgtgctggagagtagacatccccctccttgccgctgggagagccaaggcctatgccacctgcagcgtctgagcggccgcctgtccttggtggccgggggtgggggcctgctgtgggtcagtgtgccaccctctgcagggcagcctgtgggagaagggacagcgggtaaaaagagaaggcaagctggcaggagggtggcacttcgtggatgacctccttagaaaagactgaccttgatgtcttgagagcgctggcctcttcctccctccctgcagggtagggggcctgagttgaggggcttccctctgctccacagaaaccctgttttattgagttctgaaggttggaactgctgccatgattttggccactttgcagacctgggactttagggctaaccagttctctttgtaaggacttgtgcctcttgggagacgtccacccgtttccaagcctgggccactggcatctctggagtgtgtgggggtctgggaggcaggtcccgagccccctgtccttcccacggccactgcagtcaccccgtctgcgccgctgtgctgttgtctgccgtgagagcccaatcactgcctatacccctcatcacacgtcacaatgtcccgaattcccagcctcaccaccccttctcagtaatgaccctggttggttgcaggaggtacctactccatactgagggtgaaattaagggaaggcaaagtccaggcacaagagtgggaccccagcctctcactctcagttccactcatccaactgggaccctcaccacgaatctcatgatctgattcggttccctgtctcctcctcccgtcacagatgtgagccagggcactgctcagctgtgaccctaggtgtttctgccttgttgacatggagagagccctttcccctgagaaggcctggccccttcctgtgctgagcccacagcagcaggctgggtgtcttggttgtcagtggtggcaccaggatggaagggcaaggcacccagggcaggcccacagtcccgctgtcccccacttgcaccctagcttgtagctgccaacctcccagacagcccagcccgctgctcagctccacatgcatagtatcagccctccacacccgacaaaggggaacacacccccttggaaatggttcttttcccccagtcccagctggaagccatgctgtctgttctgctggagcagctgaacatatacatagatgttgccctgccctccccatctgcaccctgttgagttgtagttggatttgtctgtttatgcttggattcaccagagtgactatgatagtgaaaagaaaaaaaaaaaaaaaaaaggacgcatgtatcttgaaatgcttgtaaagaggtttctaacccaccctcacgaggtgtctctcacccccacactgggactcgtgtggcctgtgtggtgccaccctgctggggcctcccaagttttgaaaggctttcctcagcacctgggacccaacagagaccagcttctagcagctaaggaggccgttcagctgtgacgaaggcctgaagcacaggattaggactgaagcgatgatgtccccttccctacttccccttggggctccctgtgtcagggcacagactaggtcttgtggctggtctggcttgcggcgcgaggatggttctctctggtcatagcccgaagtctcatggcagtcccaaaggaggcttacaactcctgcatcacaagaaaaaggaagccactgccagctggggggatctgcagctcccagaagctccgtgagcctcagccacccctcagactgggttcctctccaagctcgccctctggaggggcagcgcagcctcccaccaagggccctgcgaccacagcagggattgggatgaattgcctgtcctggatctgctctagaggcccaagctgcctgcctgaggaaggatgacttgacaagtcaggagacactgttcccaaagccttgaccagagcacctcagcccgctgaccttgcacaaactccatctgctgccatgagaaaagggaagccgcctttgcaaaacattgctgcctaaagaaactcagcagcctcaggcccaattctgccacttctggtttgggtacagttaaaggcaaccctgagggacttggcagtagaaatccagggcctcccctggggctggcagcttcgtgtgcagctagagctttacctgaaaggaagtctctgggcccagaactctccaccaagagcctccctgccgttcgctgagtcccagcaattctcctaagttgaagggatctgagaaggagaaggaaatgtggggtagatttggtggtggttagagatatgcccccctcattactgccaacagtttcggctgcatttcttcacgcacctcggttcctcttcctgaagttcttgtgccctgctcttcagcaccatgggccttcttatacggaaggctctgggatctcccccttgtggggcaggctcttggggccagcctaagatcatggtttagggtgatcagtgctggcagataaattgaaaaggcacgctggcttgtgatcttaaatgaggacaatccccccagggctgggcactcctcccctcccctcacttctcccacctgcagagccagtgtccttgggtgggctagataggatatactgtatgccggctccttcaagctgctgactcactttatcaatagttccatttaaattgacttcagtggtgagactgtatcctgtttgctattgcttgttgtgctatggggggaggggggaggaatgtgtaagatagttaacatgggcaaagggagatcttggggtgcagcacttaaactgcctcgtaacccttttcatgatttcaaccacatttgctagagggagggagcagccacggagttagaggcccttggggtttctcttttccactgacaggctttcccaggcagctggctagttcattccctccccagccaggtgcaggcgtaggaatatggacatctggttgctttggcctgctgccctctttcaggggtcctaagcccacaatcatgcctccctaagaccttggcatccttccctctaagccgttggcacctctgtgccacctctcacactggctccagacacacagcctgtgcttttggagctgagatcactcgcttcaccctcctcatctttgttctccaagtaaagccacgaggtcggggcgagggcagaggtgatcacctgcgtgtcccatctacagacctgcagcttcataaaacttctgatttctcttcagctttgaaaagggttaccctgggcactggcctagagcctcacctcctaatagacttagccccatgagtttgccatgttgagcaggactatttctggcacttgcaagtcccatgatttcttcggtaattctgagggtggggggagggacatgaaatcatcttagcttagctttctgtctgtgaatgtctatatagtgtattgtgtgttttaacaaatgatttacactgactgttgctgtaaaagtgaatttggaaataaagttattactctgattaaa

SEQ ID NO: 85 - DNA, 83410 bp, Homo sapiens
  source 1..83410: mol_type = genomic DNA
ccagccctgcgcccccagcttctccctgctcatccacatcttgggatctcacccctatccctccctcccccgccccacgcgcacactgcacaggcctgttcgtcctgtaacatcatttcccctcccgcccaggctcactcctagacatccctcagcctctgatccgcctgtcacctcctccaggaagcctctgctgcttcctctggacctgctacctccgtggtgaggggctcgcctggcccatccctgcgtctgcagagcccagcactcaggcgagcccagagcagggccgtggagcgcccgctgagagaagagtggacgaaagacaggagggaggagggcgaggaggcggcggcagggggagcgtggggcggaggcggcagcgggagggagcgcgcgcgctggcggcggccgcccagggccggggccgcgcgcccagcctgagcccgccccgccgccgagcgtcaccgaacctgcttgaaatgcagccgaggagccggggcgggcggcagcggcggcggcggcggcggcgggggcagcggcaaccccggcgccgcggcaaggactcggagggctgagacgcggcggcggcggcgcggggagcgcggggcgcggcggccggagccccgggcccgccatgggcctccccgagccgggccctctccggcttctggcgctgctgctgctgctgctgctgctgctgctgctgcagctccagcatcttgcggcggcagcggctgatccgctgctcggcggccaaggtgcgtgcagccggtctctgactcggctctgctccgccctagccaccaacaaagcgcggccgggaggccggagcggggaggggtccagaacccggggctatcgggggctcccgggcggacaggctccacgcgaagcggctattcctgaatttgccctcggccccccgcccccgcgggcctcggtgttgagggctctgccctctgggcagcggatcttgggggaggggtgcaggggggcttggccagcggggaactttgccggaggggcggccattcatggttccggatgagctgtgtgattctcgccgttggggtttatttgacacgcgcgctccgcggcggtaatgagcagagccgggcggcttctccgcttgacaatgcgtttccgcagacccctgcgcgcggcggagagagagggggctgcctgccagggtgatgtgcctgcggctcccactgcgcctggcgcgcgggcgcggggactccctatgggctgtatctgagcagatctctgactatgggtcgcgtgtgcgggtgagtgcgtctgaatggagggtatacccaggtcgtgtgacactttaagtaggtgcctggtctcgccgtgccaccgagcggcccgacatccacggaacccctgccatcgtgccctccctttggatggagtgtgcctgaagcccccggggtctccataatcgccccctttcctcctccccagcgggtccttccgggtggcccggactgcatggtggggagtggggccgagtccgctgatccagctcacgctccctccccctcgcagggccggccaaggattgcgaaaaggaccaattccagtgccggaacgagcgctgcatcccctctgtgtggagatgcgacgaggacgatgactgcttagaccacagcgacgaggacgactgccgtgagtggcgggccagggagctcagacccggggagagaaaaggaacggtggggggcaccatgcttggcgcgcacgtggctgcagccgccgcgctgccacctgcgcgggacttgccgccggagcctgcgaccgggaaaccgcctgggcaccgcctccctcggggccgggtggctcttagcgacccggagcgggcaggaaagctggcgtgtcctggtggggccggggcggagccccgggcagtgtgccggaggaggaaggcgcaccatgctggggagactgaaccggagctgtgggcggggacgcggcagtccctgcaaaggtctagcttcccgaaacacggccctctcggactcttgcctcggccccgcgggacgcgcgcgtgtttcaaagttccacgcagctccgggccgcactgcgctccttttcctgctcagtttttgtgaatgaatgggctccccagggcccctgattggctgggcgaggaccaccccataggcccccgtggccggagcggccaatcgcggagcagacggatgtgtagtattcgggttccctgggcgcgggggcaccgccctgccctgccccggccccgccccggccacacccccgcgcatatccttagggtggtaggtgcaggcggggctcgggcgccgcttttctgccgagtcacagtgaagacctttttgagccaccctggttagcagaccgcgctttcctgctagccctgcccggctctgagtcatgtggcacaccaggaaggagggtaccaggagggagagtttgtttcctggaaggggcccgagaagcccgaggccacgcgtgaaacggctgccggccgcctttgctgggcgtgcgcgactgatttagaagtttcttctcagagtgcacagggtttcagagtgtctgcgggaccgggagctagttagcaggcagttgtcacggtggaagaaatgtagctccgggaacagaaaaacagggctctcctagagacatagacccgggcagtcattcattcatcattcgggagcatctgctgcgtgccaggcgctggggcgccctccaagacaggccagccctgccagccagggagcactgacggggtctgagggaggagggcgacaggtggacaggcccacagccccacactgcacaggaagggtcacgggacacttggacaggcaccctctctgttgaatcgttttggtttttgactgtttgccagtcaccctcccgttcactttcagacctaacccaaagttggctttgtgtcttgtgcgtggcagaactagactgactgagtctatgtctctagcacatctttccctcctgcctcagtttcctcacctgaccacttgggttcacataattcctgccccagcaacatcattggactgttttgaggaccagttctagaagcgaaattggaagtaatgagactaatgtgtgctgaccattaactgtgccaagcactgcagtaagtacttatcttgtataaactcctttaatcttcataacagtcctattttagagattaaaaaacaaaacaaacaaaccaacaaaaactgaggcactgaactgtgaagttacctgcttagcagctactgagttgttaagtaggagcctgaacttaagcatctaactctagagttcttagtctaatcatgaccctggaccatttcccagtgctgttgaggttatgaaaatggctgtgccttggtaaaatattgcagtgagtttcctcactgggagttgttctgtggtctccttagagtgggagtactgaggacgaggcaaggaatagaaactgcgtgtctgggctggttatgccttatctccctggctctttataacaactgtccttgtgaggatggctgtgaaaagcagaaattttcttgtcattctactttctagataaggatgcctcctcagagaagttgagtgacttatgcaaggtcacacagctcaggatgacagaacttggtcaggatctctgcctgcctcgagttcagggcactgtctgctgaggtggggagtgtggtgcggaaagcaccaggagtgtgatctaggagctggaaagacgggctttaaatgttaggcctggtgcgtttcagctccatgtgaggctttggacgagatggaggagtaaagtagctgggtgctgagtgacgctcaggtgggccaagagagctccaatggccaagctgggctcctgcatggctctgagatgcatggggtagagtcataggcagggagttattaaacaaaagtgaatgacgtcaagcttggagtggaaagggtggcggcgctgctgatagtaccaagtagtaatcacacatggcttggcttttctgagcttgtttcctcatctgccaaacaggggcagctgtccctccaacgctggctgtgcacatagacacacagggctggcaagaagggaacggatggatgagtgttcccacctccacggcctttagaaacggactcctggtagccataaagggaaactgaagaaacggagtggggcttacgtggctgtgttggggccaggtgctggaaaatgttctttcctcagcccttcccgcattctaggccacctgcccagactgaatttctttgaactgttctccctgcaggagagagagctgttggctcgtccctgaggagctctttattaaacctgggatggaggggtgataggtgctgggataacaaaatctgctcctccctgagcagtctccgtgccttacccctgaccaccctctttggcacaccaccctgcaagagggcttgagctgccccacctttgtacatctctgggcctgcaaaatgggggttggaatttgtagatagagtctgcgtgaggcaaaatgagtccaagttcccaaaggggccagaatgcagcccctgaataccaagaggctggaaggagggaacttttaaggaagccaagaaaggcttcctggaggaggagactgctgaactaggcctgaaagatggtaactaatagcattcccccagagtttaccatttaaaaacaggtggtattgttcctatattatagaggacataggcttggagaggtgaagtgactcccccaaagtcacagagctcctcagggttggagctggaactcaaactgaggccttctaagtcccgagcctcatccacagtggctgggacttggctctttggagacacagatggagcttgcgggatggaagagggaaaagctcctggggctttagttctcagctcaaagaaccttcaaagtggaggaaggagctggaagctagagagccaggcccaaggaagcccagccaggggaagtcgggtgggattcctggctgtgggcctgggtcacgtaggccagctggcccctgggcctcagtttcctgttgctccctagtgtctgggggcagaggcagagattccggtctctggcctggcctttactcccagagtcacaacagtaaccatagcgccgatgaacgctgtctgggcacttgctgtggaccgggcatcgtgctgagattgtccacacatcgcccctcgttcctctattctataaaatggggcaacactatgaagtacctgaaatagtcctatctcatcgaggcacagacgggttacgtaactggcccaagggtgtagaactgctggggtgtgaatgcgggtgaccagctatggaacttgtactgtctcaagtactggctggtgacttaggtaggtccttcccaggccttcatttccctgtcttgagatgacatcttaaggctactccacctcgcttcctcctctaggaagttctgtgcttctcgcggaaaggctgggtagacaggtggaccagttttgtgctcactgacctcgactttgttcaggcttctttggactcttttgttatcccagcacccatcacccctccatcccaggtttaataaagagtggccacagggaggtctcccatggctgagagttcattagctgggcaaggccaggctgcaggagtgctgagtcttgctgggaaacagcctcataaataattaaagctcggccacagctccctgcctgtgctgtagcccgcatctggccctcagtgtgcggcctggacgtgtgctcctgacactggacccagcctcatctccttcgtggatggagccatctgacgacagtgtggctcctttctgaacctccccgtcttcacctgaccgggcaactccaccatccagagtcctcctggggctcccaactatccagagaataaagtcagtgtagactcctctgtatttggccctctgtgacctgctcctgttacccacttccctgcaacctcttcccgcctcttcctgtgagcctgtgacaccaaattagcttctgccacactctcaccctcctgctgcttctcacctccaggcctttgtgtgtgctattcctcctgccggacaccctgctccctcactggctggattcattttatcatcctaagagatccggtgcaggtgtcacctcctctaggaagccttccctgacaccccattgcctccaggctgagatacaggatttgagttacttagagacccatgtcaaagtcacaactcagacacacctggtttttacatcccagctgtcgcctcctggatgaatggttgtgaggatgatactaggccctccttttcggagattaaatgtgaggattaaatgaggtcacatgcctggtaagcaggaggtgttcagtgaatggcagtgggtgaggttgttcttggtgggaggggtttcactgaggtctctaggtacctgacgtctggtctttgcaggccaacccggaccccttgcttcccctgctcctgtctgcttagccagatgtcgaggttcctgcagctggtgctcgcctcagccagggagttgcccagccaccgtagaggtgacagaaagctgcttggaaaggagctgggggaagaaatgagtcaaacaggcctagggccctaggaggggcagcggatggcttccctctggctgtgtgctggtcctagaggctggcttctgtcctgtctgctcctttcctcttggctgtgcctggggaggagaggagggcctgcatcccccatggcactgcccagcaggccctagcaggccttgggagtgtttgctgaagactttcccttgggccctcccaggtcagcattccccggtgtgagtcccttgggcctcagggatggttggcttcttcctccccagttgtctgctggtggccgacttgacaactttcctccttggggaaatgctggtagcaggtgaagccagagagagagagacccccagggggcagtgaggagcgagagcccagagggcggatggaacaggcacgcccttgaaggaagtaaatgcatgcatgctctcccagcaccaggttagtggtctactcccaggcccatgctgtcccagggggccagcactggggtctgtgggagggtgtggggttgtgtccttagggttgtggagccaggccttgcagccccaggcctaagtaacgttggtagcacctgccccccaaatgcccacacatccagatcacccaggctctgaaggcctggcagggatgccacttcctccagagatgcctttctagacccctgtcctccagcccctcaggccctgagctcccacaacgtgtcctttttcttcccgcagttgcagatccttctcaacattgtgcactccgccagccttgtgctgggcagtaggaattccaaagtcgtttcctcaaggggtagctaataacagctattggctgcctatatcccatgcctgggaccacgttggacaattcacatcctttaacttcactactcacaaccctgggagggctagtttttcgttctcatttcgaagatgatgaaactgaggctcagaaaggagacggaacttggccaatgtcatgaccattaagtggtggagccaggagctgacccaggtctgtctggtctggagcccagactcttcttaagccgttccccgctgagcgctgtctaccctggtggggtcagaggctggtgcttggagggtgtgggaggaagtagggagcagctgcaggactcagcagtgcctccctgagctaccagtttctgacctggggagtgggactggggagggaccctgttctctggagaccccgcagagccctcacataggccttttccagctcccatggggatgacattccagttttcataggcttctctcagcctttgcctgttagatgctgattcttcttctgactgtatggaaggggaaactgagaacctgatgatagtgatgcacatgacctcagggagtgtcagcccagggtcatctcttttactctctgtagtaacacggggcctggctgcctcctcgcacccaggcttagaaaggtgaaactaaggccctgatggtcgaattggctccatcgtcagtagggcaccattctcagaactcaggtgtcctcaattctgggtgggactggagtcagaactgtatgtgcttccccctcccacccccaccctctttgttccctgctggatccgggaacagggtgctctcaggctgaggggtggacacaagccttttgcagtaccgaagggctttgggctcctgactggggacctcaggtgcaccactggccccactgggccctgcttgcccacttctggattgccaagaagtcatctaaaatactcacgttaacactaagaagagttagggagcgagctagtgaggggctttctcatgcaagacctccttcagccggtgccttgaggtatcatgactgcatttcgcagaggagagaaccaagactctgagagatgaagtcacttgccccgggtggccccgctggtcagtggcaggactgggccatgcctgtctggctgcaggtctgaggcagctgaaaggagatatgcattcacacatcccagtcacgatgacagtaaagtgtggcttgcaggctgtgctggggcctctcttcctttccaggcgtccctctttgccagcacctgctagtgggtgtgccaactccctcctgagcagcccagccccttgggcgccctccagcatgagctgggtcccccggcagcggttttaattatcagccctgctcaccccagctcctctcacaagctgccatatgtcatagactccagtaatcaccccgcagccggagtggcaggggaggggctgagggccttcaggggaatcctgctcagtcttgaccgagttcctcactgactgtacccgctctgacctctttgtctctggtggggcccagcctaggtacccacaatgggagagccgggcctagctgctttgggggcatagaatgcggcatgctctcaggcgccatggagtgtccttgggaaactgagagtcacccagcgagcccagggctgtggggctcatgtggtgcacacagttcccatgacccctcatggcctctacacgcctgccccttggaacgtggcatgtggcaggacagacaccccaaagctgtctgccagtctgtctaggagtccacgggagtggtcatttggcccccatcctcccctggtcactggccttgaggtaccacaggggacttcatcccagccactctggagggcatcttagtttccagccctctcaacctgccgtaatccttggatggcttttccagttggtgcctcacaggtgtgctcctgggaggcaggcggtgcaggagttcattatgatccccattccttgatgaggaaaacgaggctcagagaggataagagactcacccagttattggtagttctggagctaaaactcacttcaactgattttacttatttagttttccagggtaagtaacttctggttagctgaaagtaactttacacttgtaatgaaaaacatagttaataaagaacaggaaacgaaggttgcagtgagccgagatcacaccactgcactccagcttggacgaaggtagttctcacccttgctagtaccactatgtaagcagcatagccttctagagatttttctctgcatgtgagctcttgggcatgaacatatgtattttttttttttaacaaaaatgaggccatgttatgccggttgttttcacatatggctttctatggcaataacagtagttcacatccttgttttaaagggctagatagtattgtattgtgtggatcttccataatttaatgacattttctcccgttgatagatgtgtgtttggttgcttccatgtttttccctgctctgtgcaatgctaggatggacatccttgaactccatccttgtgcatttgcttggtcctttctttaagataagttcttaggaaaggagctgctgagtgtgtgcattttcatcattgccgttctgctctctagaggggagaatctttcccatctcacaactctctccctctatggccccatggctctcctttccagcgaggcaggcagctgaaggacttccctcttctctgagcacagggccacctcattctggtcccatgggacaaagcagccatatccaggccacagaaagcaaagccaggagagagaacaacgagcggtgttctggccccaagggctttcacccccaccaaaaaaaaaaaaaagcagaagagtacaaaactgttccttcattcttctcaggatattggtagaaggcatctcctccgcagcgttctaattcttctatctatgcccctaacttgctgtgtgaccttgggtgaatggctctccctctctgaacttcattttcctttcactcattggtccttattccacctgcactgcccccagcacttggagcagactcctgtgcctggagctgggttcagggctggagctggccagtccttgcctagggcagggatctgtgccttactacctggtgacagtgcggggagtatagctggcttggtgggctggattctgggcagggaaacagggcagctggactccttagctccacttccagagctccaccctgaggcccaggttccttgggtgactttcccttctgccttcttcctgcactcacaattgggccggatgcagtgcagtgatggagaaaaatggagtgaggcccaccagcttcatgagactttccgaaagcgggaaaatgagcccatattccggaggtgtgcgggctgaggaaagtactttgcccagagcctggccctgaaaatgagcgtttcccttcccttcctgagcctgtgattcctgcacagggaatggctgagtaaaaggaaccgtcctcagctttcctcctcctccaccaaggacacaacaagagggcagcagcaaaatagcagcaggagagatttaggtcaactggccagttgggaggacttggctgcctgagagaacagcagctcctcgggctgggagggactgtcggagccatctcatcccaccccatctgcgctggggccccagggtggctgcttcctgagtggcccagtggggctggttagccagccgggcctgccacggtagttagccacgtggggccttggttccccagtgggtccaggctaacatcagagacttggcagctgatgagaggcaggaaggtcccatcaggcccaggttaagctgcccgactgaatagctggaggccaagggtgggctttcctggtggcctgaatccagggacattcaagccagcactcctcccctccctccctcccccacttcctggaccctgagccgccatctgctgccctacactctcagagccctttctcggccatgggcatgggcacatgtgcgtgtgcttggggtgtgtgcttcagaggaggggctgtgtaccaggagggaggtgactattctggacccgtggaggctatggggccaagatgacactcttctcccatacccgctaagtctgcccaaaccaagccagagctccccgcctccccaccaggccgtcgtggtggggaatgatttgtagctggagaggcgccagcagtctctcttcctggcctgccccctgccacagcagcctctcctccccaggccatgtgtgctctggtcccacccggagagggctgcttgttataaacagcagccttcctcctctgctcccaccttgccgagtggccatttggcagatgcttgcccctcttggggtctctgccccttgggagtagggcatctccagcccctctcaatcccattctgtggaattcttttgttttcccctaagagtcagggattcacatggtgggagtctgccatggccaggccccaggtacagggtgctccaaggagctggccctgttctctgaggcccagggctggaagcatgggggcaggggctgtgaaatccaaccccatggggccccaacaggagacatggcctaaaccacacaactgtttattagcagagcctacatctactggaggctttttacacctacttatttttgtgctgagctctgacggggctgattttttaatacctatgagccagtgagagcagactctacatcagctgcctatgcaacactcttttgtctccctcccctccccattcccagcctgcctctactgcctactgtaggggccaagtggtacatcaggccagcgtggcctctccagcagcagccagacctggcttccagctgcagctctcccacttcctggttgggaggccccggggcaagtcccttgaatggaaccccagactcccgctctgaacaacatgggtaataaataattcctggcctatgtaaagtagcagaaacctccttggccctcagtgtgtgagttccatgagccagtcggttcttcttacaccactgaattggaccaagcaaaccagggcagagtggtctggcagcccatgtggcttgagcccctgttctctctgccacctcccccaccatgccttgccctcccctctggcccttggtctctcccacccttgaagatcctgtgctgatgtctcccctctgtgacagaggcctgatcccttgttgctgctggctaactgacctacctggctggctgccctccaggctgtcagcctcaccttgtccccaacatgccatgtgatctgggtgtattcctgctctggggctctgagagactgaggattagatcagtggtttgtgtcacttggggcagctttttaaattctgccccagccccttccaggcccatttggtgcgaagccagctgggaggtgtagatgtgcaagtccccaggacgggcccctacctcatccaggagaggatctatcacgacatggataacagcagggccctaccaggccgcctggggtcaagtccacacctcaccacttcccagatgtggggccctaagcaaatgacttcacctctctgagcacctgcctcatctggaggatggagccgcccctcaaggtggttgtgggattgacaggtgagttaacttctgaggcacactaagagcagtgcatggtgcatgcgcagtgctcaattcaagattgcctgggcttcttttgacctccttctctgaacctccctctcccatctgtccttcaggaatccccatccttactgggctgctgcactgcggggtggagtaggaggagccagggagcccccagaaagactcctttatctccctttctcccctgccgctccaggctgtcacttgctggcccagtttaattagggagaggccttctagggacctcattaggaaatgagcccagagccttagggaccttcaggaggggtggggtgcagaaggagattacattatggttggccctgcctggcccctggctttgtgccctaaatatgcctaggaagttatggacacttggtcctttagtggccaggacacaggcctgtgacatggtgcatggtcagccagggctgaagggacccatgcttctatctcctactccccctgggctctggcctcacctcccagatcaggatggagaagggtgacagaggaggcttatctggttctgctccacccagcccaggtgcccactgtccccagcgtggctcagagcaggccctggtgaaggtgttgagtgaatggatgtgtgagctgtgggcagcatcttcattaggccaaagcggcctcccccttccatcccagtgcaggagtttcctcagcagcctagtggggtggaggtcagggggtccaatgcgtccggggactgggcgctcacccactgacgaagcagctccccgcccctggactgctcttcctgttagaaaacctgctcttctgtcaatcccagatctgtctcctgcagctctcctgccctctctgatcccagctctgttaatggggcctctgcttacagagtctgcccccaccttcacggcaagcctgccccatgtcccttcctacctgcattcttgccacagcccccatgcttagggaagtccagcctgtgacagctgacttgtggtgtgggctcagataaggaccatcctctctggggccattgctgctttggctcccctagcatggggcctggtggcgtgcacattcgcaggctctataaatgttagctgcatcctgtgacttgcctcccagggctttgagaagtggagggtgaggacagaaatgccgtgcctggaggcaaaggtatcgttatggacagcttgctctcctgggtagcagggcagcagcgcccagatcctgcaatgactgtggcacagcacatagcactggggggctgtggctgaacgtcttctgcctcttggactaggccggagtgcaggcattgcctgggccttgggcaggaacctgggagtcatcacaacccctctcttccttcccccaaggcctcaccttgaataggggaaggaagaaggtcccgacactcaccctgcctacctgccagcctgggcctcccccgcccctgccacccactgccatgcccttcctggatctcagcagcagcccctgcctagtttctgttctgtcctccaaacccatcttcgctctgcagctgagtgctctgagagatgcaaagctacaccctttcctcgctcagcttctgcagtgacgcccacccctcataggaccaagtcttcttaactgacattcagagcccttcaagaccagacatgtacctgtctcctctccaggtctcacctggcactgaccccaagccccaggcgtctcctgtccagccacacctccaagagaagcctcaggcccttttgcatgcaggcccctagcctggaaggctccatctctgcttgtccggcctcacctgacctctggagtcaccatttccagggtgcttcctcccctaggtgggtcagagtctcctctgggctctctcatccttgtgtttccccacactctataccatgatgtcctgatttagagtctgtggttcacaatgcagtccacaagcctcagggggacagggacctgtggaggacggtggaggaaggaggggtggagggtgcctctgggctccgagtgtgcactgtgcccctgaccccttgctaggtttccagcccctcttgccgcacatgactgggtgtggttttctgtgagtccctgggaagcgcctgctgtggactggagcctttgggtcccagctccaacattcactgagggtttgttctgtgccaggtgccctgccagaacctggggaggatctacagatgggaaagcaggccacgccctgggggcaccagcccctaacttaatgtgtgaccttttctgaacctcagcttcctctgctgtgaaggggatgaggacccaagacccttccctgttaccttgggtacatctatgctgtggctgggatcagacatggccccgcatgaccctgaggctgcagctagaccagaacttgccctccactgggcctctggaacactggtccaagcttcacaggagcaaggggtgagcagaggttttgctctcttttcagcgaaaacgcccacttcatttgcccagcacgtcagcattgccatgtgcttgccatgcataaattgaacacggctcctcggctgctcagaactatcccagttttaaaactcaacatcctgcatctcaggaaccccttcagttgtgagcaaactgggacacttgaccagtctagctgagcccccaagccctggccactgctctctcaggtccccaggaggtcctccccatcccttgtggaatctgctagctgggcacggctcacttaattaaaaacaaagaaaaaggccaggcacagtggctcacacctataatcccagaattttcgggaggctgagatgggaggatcacttaaggccgggagttcaaggccagcctgggcaacatagtgagactccgtctctcaaaaaaaaaaaaaattagccaggtgtcatggtccatgcctatagctacttgggaggctgaagcaggaggattgcttgagcccaggagtttgaggttgcagtgggctatagtcatgccgctgcactctggcctgggtaaggaagccagaccctgtctcaacccctgcctgccaaaagaaaagactgatttcttcctcaccttttgggagaactcaagaaagaaacagaggatcttggaaggtctggaagagcagggccaaacattctgagtagggagctgtgtggatagggccaggaggcctggccgctgttacagactgcctctagcccagctgtgtgacctccctccctggcctgtttccccatctctgccctgctcacctcgtatgactgtggtgagaatcataacattcatgggcctgcctgtgttaccaccgccatttctattcttccaggcatgtggctgtctgtctgtgtcccatgttggcctcactcctcccaagtggagggcagcactgagatcgttgttctcatgatgaatagaaagaagctggaggcgctggccacgtgccttgtatgagtctctgcagtcgacaaggcccttcccacatgttgcctccaggctcatggtggcccttgggaggtgggccagcaggaatgactccacccattgtacagatggggacactgagcccatagtcccacagcatctgactccttaatggtggggagaagggaagccacatgggtggctgggctgtggccgtggcgtgtggtggttacgagtggggtcactggttggctggtcctcttcccctccctatgcccactctgtcgatgtcttcatcagtagggagagatggagacagatggaagagaaggcagagacagaggagtagggagagagagatggggtgggctggggagcacactggggaggctgggggcagggagggtccacgcagtatcgctccttcctctgtggttctcacagtctgtctgcaccgattcctgacagatggagggaggagagagctagtgccaagaggctgtcaccacaggcgggcagagttgggggagggcgctttgtggccagggcttgtgtggggaggggaagcagctggtggtctggctgctgggcctccttggagcccacaccccaggaactgccaggggacaagaaagtgggcaaagggtaagcccgccacctgcctgggactggccgtgcccatgcccctgtccaggcagagacagctacccctccccgctcctcacaccctgctgccagcagggccctccctgtaaactatggattcctcctgcgcacccctcactcggtgttgggggtgggcaggggcctggggactggccctgagctgtgatgggggtggaccagggcagggaggcccccgggataccggagggcatggcagctcagagcaggctggggtctgggtcttgcatctgctggctggagctcagccctcactgtgctaccctggatgtttcccaagccccttttcatggcatagggcctcctgcatttcctccgggctctgaagcatgtgcagggctgggcaggcatgacccggggtcgatttggcacctttgtcatctcctgtgtctttatagtatggctttcttcaggcaggactggctttcatgcactctttcccaaccccccagtgcccatcacagggcccagcacagaggaggggcccattgtatgcttgttgaatgaatgaatggatccccctgcttgcatacctcctgggatggaggcctcactcctttatacaacaattggttccaagattttcagaaacgaagttctttctggttcttcccgagaggctccatggctcccaggcttgccacaggggccacacagacaccctggctgatcctgcgtcctcagagcagcgcagaaaagaccagagacctctgagccagcccagctcctcacaggctcctgcacggctgggtctccactgcactaacctctgggttgtcagtaatcataggtgtcacatatggagccctcactgtgccaggcagcatctcattccattcacatcagcctgtaaggcaggtagttctcatcccccatttacagaggagaaaaatgacttcctccaggtcacacggcttagcaggagacagaacatctgagtcaggagggtgggaggtgggctggggtgggctggaggaagacctcctggagcatgggattgtggcagggcttggggatactgggggcttggcaggagggggcaaggctgaggaggggcccaagggcttttctggaggtggaatctgcccctgcccctgccccagcccgtctcttccctctccccatgctgtctccaaatggatccctgacaccaagactccaactggggtagtcccagaggtgagacctgtgaacctggggcccagagcccttcctgtccccctgaaggccagggtgtgggtatgctccggggcagagctcaaggccgctaaactgacaggaaaggtcagtccagtgatccgagacgtgcagggttatggctgggggcgtggggactcccatctctggtgaagcgtcggggtaggtgggtggggctgggcttcctttctgctgctgctcaaagttggttctgctcagaagcatcctcccattcatatgaataacggcgatcactgatgataaatgaaggtgtgcctgccccgtgccagggctgggctgggtgccctggggacagctgagaggagtcggaggtggaatccatcctgagagcaggggcacagctttcaccacctttatctcatccccggagcctgacacaggctgggccctcagggggcagcttagtaatgccttagtcattgaaaaacagggacctggcctctctgacgagatgcccactgtccaagggtacactggtccacagcatggccccgcagcctgacctctcccctcaccgtggctctctggatccttcaaggggctcctgccagtgactgtagtgggtgactggagcctcttcccccaacgtcacacagcatgtgggctggatgagccacctcccctctcagtgtcttggtttcctcttctgcacaggggcgtcttggcaggccctacctcaaagggctgttggctgggaagattaaatgagatgatgagccccacgcactatcatcaatgacgcttatgcttatggggagtggggtgggaagcacctctgctctccatgcatgacttcatgaattctttttttttaaagatggagtctcactctgtcgcccagcctggagtgcaatggcatggtctcggctcactgcaacctccgcctcctgagttcaagtgattctcttgccttagactcccaagtagctggcattacaggcgcctgcgaccatgcccagctaatttttgtatttttagtagagatggagtttcatcatgttggccagactggtctcgaactcctgacctcaggtgatctgcccgtctcagcctcccaaagtgctgggattacaggtgtgagccaccgtgcccggcccatggatcctttaacagccctctgaggggggatctgtcctgtctctttactgatagagatggtgaggcacagagaggtggggaaacacccagggtcacgtagcataggagtggcagcagcaggatttaaaagcgggtctcttgcactccaaggtccacgtgttagccagtgcaccaggcaagggataaaggacttagtgtgagagctcctttggaattggagttgcagaggctctggcttcctgtgctgatctcctgcaagcctccagcccccagtcacgtctgtcagcagctctgagagccctccttgggcctctcacctcccacatgagcagggaatcagcaggcaaggtccgggcggtgaggatgggggatttcccgactcacttgagatccgtcacattaatgttaattaagccttgttaattcagccctctgcttacacatggctcctgacagcaaattgctcataagtgaggcagtaaatttattgctgctttttccaaacatttagcagcaaagacggtgccccaggaaaggcagaggagagacctggagggccagtgatgcttggttcctgctagcctgaaccccccaggatcctcatggcctagagaataaggtggggctccccaggagacctgggtgagaatgaaattctggcctgctcggagcatactgcctggagatgcggtgagcactgtctcagcactaactctctggtagctctgtgctctgtgaacatcccgttccctgcgctgtcctcccacagtgccttgaagtgtgccctgcacagtagggctcagcaaaggtgtgtttggatttggatgtgcagccccgagcccacctccatgtcaggaaagcctcgctgcagtgcagtctgataggagagccagcagcctccgcagggactgagcgccctgcatcctgaggtgtgcacctggggccagaccactccgccagggctgctgggaaggggtctctccctgtcctgggtcataggagcactgttggaaccaggatcaggctcagattctgggcctgtgaccccagccccttgctaggctaggtatctactcaccaggtgagggggaagcctctcctgggtatagtgggacaccctcgtcctaggtcctgcttcccgccttggcctcagactgggtcgtgcctggaccaattgaacaaacccaggctttgggtacctagaattttaaaaaattaattagagcattaaatggcagccctctgggagaatcccaccatctggctgtcatgggagaggcaagaaaatctatgcatatttgtctgcagtgtgtgagcatcatatgaagccaactgtgcatgtgtgggtatgcggtctgtgtgctgcagtgtgtgtccagcatgacatgcgtgtctgagtatgttcagtatgtggcgcacacctgagtgtgcaagtgggtggtgtgtgccttgctgtatgcacgggtgcccatctgcaagtacatgcgctgtgtgcatgtgcctgagtgtctgcacgtctgtctgaacatacctctgtgtgtggtccatgctcaggcctgcctttttggtgcagtgagccaggctgagctgtgtgcagatagggaaggggctcgtgactcctcctggctgaggtggtgggcacagacagctgtgtagaaggtgggacggggtaagtgtggcaagtgcacagctggccttcagtgggtgaggcagggcaggcatccttgccctcatttgacagatgggaaaacccaaaactggagcctgggctctggggctccctgcgtggtgctctttctgttccagcgggctgctgccctggctggcacctatgcttttggcatctttatgctgttagattttcatggtggctcaaagtggttctgagagagtaccaccccccctactcagtattgctcagggggcaaggtcaggattcccactgcacatcctgtgttcttcctgtttcaaggaggagatatcagggctgctggagaatgctgggcctgatagtcctctgactgctgtgtgacctgggcccatcctgtccctctctgaacctcaggggtgattgtaagaactaaatgaggagacatatacaaagggcttcgtaaaccaggagatgaggtgaggtgatgtagacagatgagggcctggcccagagatggcatcacaatacgatcagagccaaagctgaggcccaagttcatgtgtcccagggtttcctgaggagcaggccaggaggtgggacccaggacagaggcaggtgccctcccagccttgcagactctgaacctgtcctcagaaccatctgcctggtgccagcactctcctccaactccagccccagacacatggctcatggcagtgaagtaaagcaggaacagacccagggagcagtgggatccaacccctcaactggtgttgacgctgaggcccagagagggggagtggcttactcaaagccacgcagcagctcggggggtagagctgggaccaaaacccaggcctcctggcccctggctctgttctccttggtaccataccactgtctttggcaagagaaagaggacacaagagctagttcacatgcctggagaaaaggatgtgggagtgccacccagctagacagcactagaacagaccagagccccacttcctgcatgaatggaggatctgaagcaaggcttcaatgattactgcttttcctaggtatgcagaatgctggagggtaaatagggtttgtgtcctgggctgtacattctgtatagatggaaaagccccaggcttccagattgcctgcatgcgatgccttcagcacacgcttcctcagtgcctgcctccaccgagctgctagtctggtagagaaagatggttgagtgccaccaacacaggatgatgaggctgtggatcagaagaggtctctgatcccacatggggtcgtggaaagcttcccaatagaatagagaaggggaggagggtcctccactcccaactcccagagagtgaggaatgtgtgcgcctcagacaccctggccccctggcagtctgggcctcataagagctcatgcttgggcaggctcaccgttcaccctggagtgggtggctgggtgccttccagcttcctcctcagcgcctctcctgtgccagggcccatgcacgtgggtggaggagaggccattctagaggcccctggctccctgtggggctgaggagagactagtgtgggggcaggggtggaggtgcagggaagctggtggccagacctcctgtgacctccactcattgcctgtgtgtccaggtgggccagtctcagctgccccgcttggcgttataaccattgtggtgttagccagggacgaggcttctgaagtagcctgcactgtgagccccgctggctgccaggtaataattccacccgccttgacctttttctccaaggaacaggccttctactttatacatggagaaaacaagtcacagaagaaccaggtggcccaggatgacagaggctaggcctccagatgccctttaaaaattgcaacaaaaacctcttaaggactcactgtgtacaaagcctggtggtggggctgccacagcggctgggataaagggaggaggaacttcggtcactgaatattttctgtgtgccatcccttatgtcgggcactgatagacgtgatctagcaaccaactgccctccgagtcaggatctaccaccacatttttaaatgaggaaacatgggctcagagcggtcaggtagcctgcctgaggtcgcttagctagtaagggacaaaggcgtgatttgagtcctgcgttccttcacctgtttttgtgggagaatggccatgtcaggcagcagactgggatcttccaaaccttagttctgggaggaaggttcacttgcaggaaaaaccaaggtgagtggaatcatcttcaggcagccagcagtgctcactgggcaggctgtttaaaagtggcttcctcttcaagctgtagtgggacctgtcttactgggggagccatgctggctcagaacccctaggctgatgggcacccctctgtaaggggctctgagaagtggccggtgtggctgaggtctgggccaggatgccagtgggcggtgagggtttgctgggcacatgaccccacacctttcctcttcttgcctcccacagccatgtctgtccccttctgcccagctctggttggaggtgctgagctggggcttgtggccatgaaccatccccatactgctggccctggggctggcctcagatgggtgggtggtcccggccagagccctgaaccccggccctgccagaaccaacacctggagacatggccacctccgaaggtcttacctaactgcagggcgtgccagcatctagcagggtccctcacgcacagttggcctgctgcttgattattttggcttccagcagcagagacctgagactttcccggtagcataggagtcagcagaagcttggccttcccagaacatgggaccagaggaggtgtcctggacagggccaggtgaggggaggctgctggtggcccctcactgagcctttctgcagtgggcctggggaccccctctgccctgagcatttgccaagcagtccagtggctgcgcgtgggcctgcctttcctcccccactttggcatggctgtctcccaggaaacggggaattttccctcattcccatcattagggtgccagggcaaacaaacagtctaatccagatgagccctgggccacaatcacactctctttgggggttttctcttcacttggagcaatgttgagaaggctggagtaattggtattccacccaggttaatagaactgctgcctcctcggtattatgccttaatttcctttatcgctcagcaagttggaattcatcgcccctttcctttctttttcccaccgaaacctatcaccagcctgtctgctgggtaaagtcatttcatggcagctcttggctcctttccacttccctgggagtctttctgaccgagccaaagaacaaggaggggtgaaaaatccatttgtacaaagtggggatctcctgttgagagcttatttccctccccgttcaagaggaaggaacgtgttcagcctccagccagcacggctgactgagtcccctgtcgctgagagcattcaagagggcgaatggccatatgtcagcggtgggaacagaggattccagcactggtgggggttgggggaaaggggcaggcctttgccactcctggtgcctggattagattagaagcttctagggttttgttctgtttgtgagtctaagatttgtgatttaaaactggaaagattctgtggctccttggtcctaacgttcaacggaatgagcctaagtacttgtaaattgtgtgttttacgattctcagatcctgagacagggagattctgttctgtgattcgaagactatcttatgattcctccagtctcttcagcggcagttttgttcctgactgggtcttgggaggagtgcaattgctttgctgaggttgccatgggagcgcgaggctgctgtggccccttttctcatgtatgaaatccaagggctgggccacatggccctggggcccaggtgtgttcagcctgcagcccccttggctccaccagagcctcccacaggccctgtgaggactggctgctccccaccacctcactggacccagatgcttttccagctaagccatgccccttgcctgtctgcccccggccctctcccattcgaacggggaggcaacccagctctccccaaagtccctgtaggaaagctggagcagtgggggagtggtggtggtaagaaataagccgcatgattgacaagagctctacctgcttttgtggtgatgtgcaatttcaccatgaatttcaacattacaacctctcttaattcccaccctctgaggtggttagccccattttattgttgaggaagctgaggctctgagaggttaagtcactcacctataatcatacaggttgttcccaggccctgactctggatcacctgctgtagtacggctctaggccgcctgggcagcatgatgaaactgtctctacaacaaaaatccaaaaaaaaaaaaaaattagctgggtgtggtggtgcacgcctgcagtcccagctacttgggaagctggggtgtgaggatggcttgagcctgcaaggttgaggctgcagtgagctgaaatactactgcactccagcctggccaacagggaaaccctgtctccaaaaaaaaaaaaaaggcattgattggcccaaggtcatatggcttgaggcaggaccagaacccaggtcatctcattcctaatgcagtgcaagcaaaggaaaaagcgagaggtggacattcatcatagagtctatagccaaactgaggaacaaaaaccctgggtgtaacagccacaacccagaacaaaaggagatgggtcttggttagactccggggtggtgacgtcactcatctcccctctctgggcctcagtgccccggctgtaaaacaaggacaccgaccttggtggtctccaagcccacatcatgttaggttccggtctaacgtgagcccgaggctgggaatctgcttgttgggtgggggttgtggaccacacgcttacacctccctgttggaaccaatcctggggcggttaaagagcttcagagaatggaccccatttccttccaaacgcactgagaagccagaagcagccttctccatctgctttcagaatccaccttttccttctggatcaaacatagttcctcggggcaggcttcctcagcccctactactgccagccaaaatcaccccctttctttgaggaccagcttaaaatgtctctcttccaggcagtgagccctccccaggcctgcctcctctccctccagcagaccttactcacaggcaagggagatgcaggcttggagaccaccaaggtcagtgtccttgttttacagctgaggcactggggtccagagaggggagatgagtgacgtcaccaccccagagtctaaccaagacgcatctccttttgttctgggttgtggctgttacacctggggttctcctttcctcagtttggctatagactctctgaaggaaggtccacctctcactttttcctttgcttgcacagcattcgggatgaaacaacctgcgttctggtcctgcctcaagctacatgaccttgggacaatcaatgcctttttttttttttaagacagggtttccctctgttgcccaggctggagtgcagtagcatgatcatggctcactgcagcctcaacctcccgggctcaagccagccgaccaccccagcctcccaagtagctgggactgcagatgtgtaccaccatgcccagctaattttttttggtatttttgttgttgtagagatggggtttcaccatgttgtccaggctggtattgaactcctgggctcaagtaatctgcctgccttggcctcccaaatttctggcattacaggcgtgcgccaccatgcctggccagttcatgccttttaaggtctttgcttcctaatctcttaaagtgggtggtggcttctgcctcacacccacctcacagctgccctgaggagccaggccgagggactggggatggagtctcaaacctgtcactcaactccatacccgctaaggacccagggccagtctgctagatttctcttgggctcagggagtatcccaatcagacaattcccttgttccccaatgcccccatgatccccacctctgagccgaaggttctcaggagcccctggcttcagggcccttccactctctccattgagcacctgccctgagccacgtgctctgctgtccgcatcacccagcagcacacctgtctcccctcccggagcgggtgctgactacactggcccacaccactccaccccaccccccacacctcgagcaccctccttctgtccctttcactctcaccttgtgaggtaacccaggcaggcctttgaatggtacacatgaaaacctgactcctccaatgtctaggtgaggaggctgaggcaccagagggtaaggggcatgtccaatgtcaccccagaggtcaagggcagcctggaggggtagccagggctcccgaggcccaaactactgagacggtctggaacccaggcagggctttgtggaactccccagagaagccctgtgaagggctttctcacaccgagggcccagctttcactaggagactgggaagggtttgcatctccctgagccctgctttatgacagtggccgagccacgtgtcactggcttactgagctgctgggatgacttctgagcctagtccggtctggtggatggctcctgaggtctcccctggccagtggggccgcagatcttcatctcagcactgacggccagggtgggcacagcctggaaggggcttcccgtaggcactgcctgggtcggtctgccaaaatacagcagcaaaataagcaccccatggagactcgagcttgctaacgtcctacctttggtgttgtgggccctggctggccctgggctgggatccactcatttctgctctgtcagaggtgggggcatttggatgggggcattgtcagacaccatgaacagctgatgcttgagctggccatcaggggtgggagagttttgcccatggaggtggaagaagggcttctggcctgggggagctgcgtgagcaaaagcacctggtatgaaggccaatggcttgtccataaccattgagtggttactggaggcaggtgatggccagggatgggccagagcagtagcagggcaggttgaactgttcctgagtgccctgctaaggcagttggtcatattcaaggggagatgggaagccagcaggcaaggaaagatggctctttgattacggagaggactttggtaggacagtgactactggctctggatttgtagcccctggagccacaggagtggactgtaagggactggggaccaagccacagttccctccctctgtcagcccactctgggcctggtggtgggtaaaaccatacctaaaaaggagaggaacttagagcttatctcatccaactcaccatgccatgaaagaagagagcaaggcacagagaaggccagagacttacatcaaggccacagagcagagccaggccctccaggccaggagtggcagacggcccattgctaactccattctcagtgagatattcttaacctctctccagaaaagccagcagactccctgcacaggcctcagcgatatcacagagtgatactttaacctgcagaccttctgctgggcacacaggtgggcacaggtgggcagaggctccctggatgaccaatgtgaggctgggggtggcagagagctcacaccagcctcctgggcacagcctgccacacactccctggtgaggagcccagagcccagcacagaggagcactccagagaggcagcagtcccacaccaggagatggatttcccaataacaggtgctgcccatttatcaccgggatgggccagtgaggctcctgctaggaaatgcttctcctaccagcctaattggtgaaagcatttgcgtttttcactagccagggctgcttcctagtgtgtgcagtctctacctggtgggcagaggagagggtgctgcagcgacccactgctgacatcagaggcctgagtgccctgcctgcctgtgggtagcagccagggacccgccacccctccccacacaggcaggggtcatcactgaatcatttgctccacacaggcagaggtcatcactcaatcattcgctccacacaggcaggggtcatcactcaatcattcgctccaccagaggagtgtctgcgcctcgtgggttcttgaatccctcgggcctggcctccttggccctggctgcagagttctgctctgggagccctgagcttcccacttacagttagtgggggccgagagcccagagaggcctgccccttgtcacacagcgtgttggtggcagagcagggctggaatgagatctagaaccttctcctcaactgcaaaagaagaagcggaagagctgcccctccttccctcagagggctggtggcaagaacagggcctggaatgcaggggtccttggcaagctccaaggtcagcctgcccaagggaggcggagctgtggacccatcagccccagggggcctggctggggttagccaggaaggtgccctggtcagaggaggccacgtttccactggggtaggagtggaaggggaatgtgaggctgggagcctggcaatgactctggctggagggcctaaagggtctcctggccttgccttctggcctctggaagcttctactttaagaatgtcatgagttttcttctagctgtttctctggaacccacaatcccagtgccaaaacccagggtggggctggctggagcctgggagagggcaggaacgtggtcatcttctcagcgtgctgcctgctctcagcagcaccccttgcgtaatgcttggtccctttgcaggcgccagccagggactcctgctgatcccatcctgcccacctctcccccatacccacctcctcccagcccctcagctgtcactcgttcaatacctcctgcaaccacaaatcactgggacaggaagacgcctttgtcggtctgtccctcggagacgctcttcttccctgtggtgacagggaggcctacataccccagcaagggcttgggcctcccttggtgacagtggggccagggtccggcagtatctgagagcagctgggatgtactggggcctggaggaggtgcttggttgtgggaagccccagatgacctctttggaaggacttggaacagcaccaagatccacaacccctccgtgtgacggggtcactaatccagaaggtcagctggagggggcccttagagatgtgttcacctgaggaaactgaggcccagaatgggaaggggtgacactccttccaccgctgggggccctgctgctgcctcccattttgtctttcctcgggcctcctgatctttgcaacctcattttcatgccttggtgttttggggcaaaggtggaccacttgtttcatgtttggaccacttgtttcttgggaaataaatagatttatggtcttaggatctggcttggttagaattgtgtaactccttagtggaatgggttggaggagagaacccagaaaattttgagggaaactcttcccgatttgaaagcaaagccgccctcaccaaaaagtgctccttccgctgcagcctcttcattccgaatggggtgaatcctttggctggagcccttcgtgtgtctccctcctcctcagcacctgcagcttctcagtctccccaggtgggatgggaaggtgggggagagggcgaatttagatgtcgcctgctgatggatgatggtggcttgagccccagagcccgctgggcagtacaaagccacgcaccgagtcccgcccaccacacgcgggtgctggctcctgcaccctactgtcaggacactgtgggaaccgttcgccttctgggaaccgccgagccttgagtagtcagagactgtccgcatgtggacttctggactcagataaacagttcctttcagggaaggcatcagaggctgccatccgcagcttatcgacatctccgactctggcggtagctgtcatggagtcttgtcacaggggcttagggtgcaaatcagagtgttacagccttagaaccgtaggtccctagagtgtcagaagcagagccatgtggaagctgtttgcaatgttataatggacccacgggatctttaaactgagggctttaggaacatcacatgtccagggaggggttaggatttgaatccattgctgctggaccccagatctgctggcgatggaggatttgaatccagtgctgctggaccccagatctgctggcgatgggctctgggcatcacccccaccaccacttccaaccgtgcagctccattttaatctgtcttatatgttgggggttcacttgggaaaagggttcctctgcttaaaaatagttttccaggccctgtgctgagccccagctccatgccaggacccgccacagcctgagagggtggctctggtagtgggacggccgtcaggccagggcccccgggtggggtgcaggttgctctgggccacggtctcctccccctctcattactgctctgtcgttgctgcagccagagaacactctgggtctgtcatcctgttgactggggtgacagtttaatagtagcttcctggactgtcatttaaatctgcctgccaggttagtaggccaggggcgggctggcacgccccctgcccccaccccggatctgcattctgctggaagcggtcgtcttggcaacgctggggcatggcgagctctgtcgaagggtaactgttggtgggagcagccctttcatctccccgacccgggtacaagtggcccaactgccttagggccagagccaggccaccctgtgctggcccaggcctgggagaggaagtgggaacatccaagtcccttctgtgcacccagctctccaagttaggggctttacctttgctctcagcctctcaactgccctaggaggggaaagaacctgccccagcttgctgaacaacaatgttgagctggaatccacctttcttaggggtcgctgctctgccttcagagaacattctctagagcccaagacctgtccacagaaaccagagatcagtcagagcctgtaaggctgacagctccctcatctccctgtcctaggtggctgggtatcaattctctctgttctttccagggcctttctctagacgtgtccctgctctgaggattggggtctccagtggggtccctgcagcttcactctgggctccatgctctgtgaacactttgttctattttttatggcctagtggggctggcccagagacagacggctaagtacaactaccaggctgctgtgtcaacacgggctagtccctcccttctctgcacctcatctaatcatctgtaggatgagaggcttgtgccccagcagtgttttcctaggtgtggttcattggaccacttgtttcttgggaaataaacagatgtggcatctgaaaaaggagttccttggttaaacaagcttggaaggctggaggaaaccgtcaatcagatatctttactgcagtccttcccagggcctttataaaccgtgggcatcatgcatctccaagggggaaaataataagtgtctatcccaaatatcctggtgcatggccacccctgggctctgtcctgccccctacccctcccctcctctgctaagggccgattttctgtcttgcatggcctcacgaaatcccaaaggaagctctggcagcctggagccctgggtttttttggctgctggagagcagccctgtgtttagcaagaggctggatgggtccctgggcaagctcaaggaaagccaggcccctgtgctgggcctctgcagggcagctttgtgcacaacttggtgaacaactccaccagggtcaattgttccctggcctggtggagctccaggtcccttgccacttgccttgtccccagcccctaatggtcactctgctcgctcctccatgcccctaagccccattatccttcctcctggaatgctcttccctgctctcttcactcccacagcttggctgactcctcttccttgaacacagtgcccctcctctgggaagccttccctgacccctgggccaggtcaggtggccctcgcctggcttgctggctacaaagtgggattgggagtcattacctgggttcaagtgcagccctcccacagacatgtgctgtggctttgagcagtcacttctcactaggccttggcttccaggcatgtaacatgggagacccacgtagggggcctcaagaccctggagtccaacacggcaggacattcggattgccaagaggaagctgcacagagcagtgcccctgggcagcccggactaatctttattttggagccttctctctgcaccggggctccacgatgcgtgtgggtggggagcagcatgggaaggatgtatactgtctcagggaaggatgtctctggaggcgggggaagccaagaagtgctgagtgattctaacagtttcacaggatcacagacactgagtgtggagagggccttaagacttagtcagcgccacacctccatttcctgatgaggaggaggcaagctcagaaggtttgacggatgggcccagtgttacacacacggcagctggggccagggctgtgacttcacacacctctaacttgcacctttttgcttctcagttcataaagccctggggccatccttagcttatttgcttctcacaatgaccctgtgtgtcccgtgaagcagacgaagaaagtgcggctcacaggagtcctgtaacttgtgtaaggtcacatagcctacaagtggcagggcgcagtttgatagaccatggactgtctggcactttccttggcccgtgttcttgttataaatagcatttcccacttcctttgtcctggatttcccactctcccctactctaccctggggtcagcccctcctcactgcccctagaatcccctagtcctttgtggcagcccatctgttgccatggcaccagattatgatgtcgcagaccctggttgactatgtatcactcctgggctgagggactcacagaggtgggcattgtccaaggggcagactggcatggggggacataaatccctggaaacagggagccatggccttgagcccagctggggaatcaccctgggaaccagagccaaggccagcagagtaggggtctggcatggctttctctgacagccttagaatggcggcacagccctcatctcatggcagggctgatatggtctcttcacgagggactattgggctcattgcactgaacggcctgacactgggtgttcaccaggatcccccagaagagtctttttgccttttgtccttgtgacaaagctgcatgggaaagccacatccccacttgcccaggttcaccccgaggtggctatgccaggagtcagtctccactctgactccagatccttccatatggtcacacttccaatggggccctccagcgtgctttagtctagtccccaccctgaaagtgctgtccattagcagagcaaaagccgtcccaggcctgggtttattctgctgcacacttctgggcacattccaggagacctgagagatgtttcagtacatttgaggactctctggggtcctcattcttagcctggtaacactgaggtggctgagggtctgagtggaaagagatcaagctttggcagctgccacacacagttgaaatcacacttctgccacctaacacccttacctctaagccttaatttcctcttctgtacaatgggattaataacaacagctaccaagatagctgtgaggagtcactgggatattgggtgaaaggtgccaggccagagccagagtggaaaatctccaagctggtccagccagtgaacaaatctgttcccaaaaacaccaccgaatctgttgccaaaaacaccactctccctgcagctgccatttcctgggcggggctgacctcaaagctgccctttgggacagcagtggtgtttttggctgctctggcctccttgcccagtgcctgccagggcttggcacatggaggaggacaagatcacccccaggctttcagaatcccagggagggcagggtttttggggggtatctggttgtcctgtgcccagcaacagagccccatcatcaccttcttcaagcctgccctgctgttttgggcactgtctgaccacacatccttgccagacttgcctacttgctcttaattcccagagactgggctgggctgattctgtgttctcagtgcagaacgtagaacagaagcaaggttcattgaatgtggaactgaagcttgcacagggctttcccacctgctgtaaggtttttcttccacatttggtactgctgaatgtttgactggggagccgtggtggagatgagcaggcatctgactgtgggttcagactgtgaccctgctccccccagctgtgaccttggacatgtaacttaacatctctgggtctggatttcctcatatgtcaaatgagtacatagcaggccccctgccatgaggtttcttgggtaaaaacacctggcagagactggcacagaggaagcacctagtgagtgttagaacgagaaaaagagaaaactaggatatacgtttctttttttggatgctgagcttcttgtggggggaaaaccactggtgttcacattaggaaattccccaggtgctgtggttcatattggtacttactttaagatgattatggactatgatttaccaataggtggtattcgcatctatcattgacgatgacctctcagtgcaggaaacagggagggcctctccagagccctgggctgagaggcaggagagctgttcttatccctgccatgctgtatttccctcagccagcccctttccctttctgggcctcaatctacccatctgaaggtggactctgattcctcaggtttcttctagttctgcacgtacagaggcattcttctaagcaaagtgtgaagaaaactcatcttagaatgcagatgtactgcaaagattccactgagaaggacagacatggaacagattcagagacacagtctctctcaccaaatccttgccaggctccccagaggagggggagcaggcctgcagccccagaagcacccagagggcctgtgggtagatttgaataaaggtggtccatgggagtggcttcccagggagaaggcaagccccagaactgtaagtatggagcagaggctggggggctgtgctcgcatttagctcagtgtcccgcactgagacctaccccaagctggattcttgctgaatttgacagtctctgtgctgcagggacagggaagaaagcaaaccatgttggactcgcaatcagtgatgatctagagcagaggtcatcaaaatacaggccacaggcctggcctgtcaccagttttttgtaaataaagttttattgaaacataaccatgctcactcatttatctaatgtctctgactgcttctgccccatagtggcaggattgagtggtgtgaccgagaccatttggccctcaaagcctaaatagctactatctggcccttcacagaaaaagtttgccaacctctgccctagaaggacattcaggggattgtaggagctcaggagaggctactgatcaagactggaggtgatacttaagcccagtgtgtaatggaaagaaggtgagaggtgggggaaggggctttcagactaaagacagcttgggcaaggtatgatggtataaaaagcatggagtatatgaggacccaccggcagttgaggtggggctagattgggaagtatgaggaggggaagatgagggagcggggcaggctggggccacgggacttctaagcccctggggagaggccacatcctagtggcccctgatgttaaatccatcccaagctcattccaggggaggactttggtggtctgagcgccccaaggcctggggtaagtcactgctgtgctgaggtatcctcttttaggctgaaaagagacccccctgccgtcttcatttctgggcctcctggtctcgaactaccacacctgaaagcttatctctcaccagatcaccctctcttttcctgatgaagaagctgtaggccagaaaagggccatgatgtgcttgaggatacagagcaaaatagcacagcagtgtctcaaatccagacctccggactccctgcccagtgctctcttcctcaccttgttctgtagcgggtcctggatgcttggtccagcaggaacagggcatgtgtgagttcaatgcagatttgatgcagatgagcccccaataattcagaggcctagggctgctacagagggtgcaggatgtcaggggtggagcgctcaaggccccttcccggtctccaacacccccgcacccccaccacctactgggggtagccaggcagcctcagttcccccatggaagtcctgacagggcaactgctctcccccgggcctgctaggtgcgcccagtgctgtgctgctgcttgggaagaagctggggcaccttatgacatgggcatccatctctgtttcctctcattgatctggaaactctagttcctcgtaggacaagacacagaaggcagtaaagaaccgggctggggatggtacctgcattcttatctcagctccgtaaccagctgtgagctctcagcctgctacatcccctgtgtggacacagaaccccattccttcagcttctaattaagactcaaaccctgaaaacaacagtagctgccacttctccagcatctgccatgtgcctgagtctgctgcaggttcttcatacattacgacttcttgttgctcctcctcaccgccttttgtcttcttctccctattatatagataagaaaatgtaggctcagagattaaggaacatcctcaaggtcacacagataggaggaggaggaggaggaggaagtgggattgagatccccagagcagtgtggaggtcaccctgcaggctgtaggcaccggggggcagggactgatttgggtgtcttgcccagtagatcctcttccgactgctctgaacacaaaatacgtcattcatcttgccacaaaggaatcatctatgtgtaggattcatgatcacaaactcccctggcgcctgcagaagggactttgacttccagtccagttggggaaagtgggacaggcaggtaaagagactgagaactggctgaaggagctaaggcagctgctgtagggtatcagggaaggcttcctggggacagtggcagtggaactagacattgaggggaagcaggagtgtggtggggtatgataaatcttgtcatgcttgctgggtttgagctcttggacttggagggcagagcagaatgtcacctgtcttcacgcagtgttcagatgcctaaggaatgaagaagcttgtctctcctgtcctctgcccttggtcagcaaggcagtccatggcctggtttgcagaccaagcacatcctggtcggcccaccaccctcctgactgctcccaggctcaccacgctctcttccttgccctgcagccaagaagacctgtgcagacagtgacttcacctgtgacaacggccactgcatccacgaacggtggaagtgtgacggcgaggaggagtgtcctgatggctccgatgagtccgaggccacttgcagtgagtcctgcccctcagtctgggtgggggtgggcctcagtttcctcctcagatcttccttgagaggctgtgaggctcaggagaggtaaccagttgaacattctgtgccacgcactcagggcgctcctggtaaacagatatatttagttgctggtttctactgacctgtttctggactttcttcacagccctcttgtaggttggaccctgtttctgtggcagcaggagctagaaacagccctgtcaagcccttctgcccagaaggagccctagcgtgtcctccaggcctccctgctgctgttcttgaggaccccgaccataattccaggagtgccagtggcagctggtgcttcttaagcctttatcgtgtgctaagctctctgtgtgcattaatgcctttgataaccacagcagcctcatgaagcagatactgtcattttctgagttttgtaacggagaacactgaagctcaaagaggttgagtgacttgcccaaggctacccagccaagactttgaggctctggcccgttcctctaccctgggtgggctgagcctaggagctcctgcctccatggccagctgggtggtagcagaggcaggcagggggaggtagaggccagagctgagccccaggcctgccccctacactcagggctttgtctctccatgatttattttccaggccctaatcctcaaagcaaacttacacccggcaggtcattctgtgacatttgttaaattaaaaaggagatgagaagggggcggggaaggacccagcagtccagaggcagagcttcagcagcgtgagcccgagacaaaaggctcaggcaaaagcatgtggaggatagtggggctggcggggacccaggagcccctgtttaggggtaacagtcgtcccagaggcagaggtggggacaatggagaccggagtcccatctaacgccgtggctggtgataactgggtttccttgtctcctagcaacagagctaccagtctccacataagagaaagagaaagggagagagagagaacagagcaagagcggcccccacccgagacaaggagccctcatttcctcgtacagctgctcctggcctccccagccatgccgcaggccccatcctttccttacccaccacgtggccaaactccatgccgtcctgaaggctcccaggcaggagggaagcccagtgctttgtcctgagcttcagaaggaacaaagccctgccacgcccacttgtgactttcatcctcttggcaacctaaggaaggaggaggatccccatgtagagagaaagaaactgaggctggagtcagttctcccccttgcccaaggctgcccagctaacaagaggcagagtcgtgtgcagcctggagtgtgtgcttggggagggtttgtggccacagggagcttttccctcactgcagtcagccagctcctccatccgtacctcactccagcagatactccgacaatgggggcagaaagggaagggagaggagcctcatcgtggttatcagagggggctgccttgctacctgagggctaggctccccttctccccctgccccacccccacccccgtctctatctctttgtgtggatgtcccttttcatcttccattctgtccccttcggggtcccgcccacccctgccctcttgggctgcctcccttccctgctcatctcctatcctcaccctccctctcaccatctcttctcactgccctactcatgtgtccctctgtctttttccctcttgcccatcccagcacctgctgccttcccatcccctgggctgggcaggggccctcctgcctcattcctcctgcctcccaggcccgcttttcacagttgagggacaacaggaggcccagagaagttgatagacttccttcaaaaacacacagcttatccatggcaggtctcccttttatgaaaaaaggctcttcgagctctctgaggtttcataaggcgtctatgggagcagtagccaaggcagcaccccaggagacagaagcccagctctcctgtgggctcttccagctactcactgtgaagccctgcatatcttcccacctccctctgggccctgatcagtaacactccggaattccagaatcttctccattcctagattcctaaactcttagtattctgagaccccctttcccccttgcttgtgctagctggggtgcaagagccatgatacccacttcctgtgttacattggtcggtgtaggcaaggcggaagactgcctggaggaagttggctagagtgggagctctggtcagggtcaggcagaatttggggcagcaggacctgatagcaggcttgctcactgcttcccaactgaatgagaacctagcagccaacctgctatccatttaattggtgttgccatagcaacctccacggcccaccaggttcctggggctatgccagctcccaggatggagccccattccctacccctaaaagaaagattataggcagtaaagtgtagtgagtttgggattggatatagttgggttcaggtcttttaacctgttagacctcgggcaagctgcccagtcatcctgaacctcagtttactcatctgtaaaatgtggtaatggtacctgccttagagggattgtgagaatcaaatgaaagaatgcaagtatcatcgctggagtaaatggcagtgttatttgtattattatattttggctgcaagccccctctccccaacacaacagtgtgttagatattaagatgttagattcttacagtgttaaaatagtgtcagtgaagggagttgcattgagcgggaaagggatttgagagaaggtcccaattcttgtgttttccccgattatgttgtctgtccctagctggctggggtttctcccagctctgtttccctctggttctgtgttctgtacctatcaaatgtagccaggagtcacaatggaaaagcccagaacatttgcctaatggcaatagcatttcagctctaattatagctcacttgattggggacggcttctgacccaccttcaggcttctgttgggaggggtgagggtgggggaggggaggatggttcaaggtgagttatagttctggatgctatttatttgaatatggaggctttttcatgcatcttagaacctttccacctgggaggggggcctctctgattaaccaggctcatcttgctattatagatcagaaaatggaggcccagagattttctgagctcactcagtaagttagggactgacccagctagcagcattttgcctggccttgactgaaggaacttggtgtaactcccccttctgcaccttgggtggccccatgctgtgcttcctgtggattgagtgacactggcagttctcaccaccggagcctctggtcccttagagctggcagtccccatttggaggttatctgcccctgaaactcacgtgggttgacactgtagatgcgttccctcaatgggcagccgccaagtactttcattctttaacagacattgcccttttcgttaatttgtgaatttatgaattggagaaagtaccaatggatttgaatttctggggcaggattctctgggaatttaaatgcctttaaatgccgtgagccactccaggatacagagtttcatgaaaagcccccttgccagctttggagggttcctgttgtctgagagacagtgggattcttcactcctgcctctcagaacctagggtacttggagagcaggccaaaggcatatggtcccctccgggggcatctgtcacagagggagtggctgtcctgggatggggtctgcatcgcggtggaccatgtggacttataatgtgcattccccagtggtgacaacaggcacgtccccagccattggcatttgcacttcatgaaataaaacaagggcaagtgttttctgagctcctagtttgttccaggctctgagtgtagggatttccatatggttccccttttaagccatccaccaaccctaggagattattcaaccccattttcagatgaggggagccagagtgcagagaggttcagtagttgcctaaggaccttagttttagtaaatgaaacttggatccaggtctgtctgactctaaaacccaggctctttctcctacatcatgctgctgggggcccttgggcttcagttatcctgagagtggacatcagatggccatcgtgcagaacctgcccaaaggctcagtgagtccccttcctccagtgacctctctctgggccagtggtgccagggagaccaacagggtctgcttgattctcttgtgcagtggttaggtgcagtaagttaagcactgtgtttggacctgggatggaagtccagatctgcctctcaccactagcctttgaacaaacaacttactctttctgggctttactttcttcattcataaaatggaggtaagaatatccacttcatagggtgataccatgtgtcagtcattacccagaccaacttcccaggactgtggagtagagaggcctgacctgggaccctgcgagccaggctcaagtcctacctttgggggaaagctacatcacaggagagacagtgaggttccaggagagacaggaattggaatacccaactgccagtagctgtgtgaccctaggcaggtcccttttgctctctgggccttggtctcctgccactccaagggatgttcatcagtgtgacctctgagatctctcaagtcctggcattccaagagccttggctctttgagggtggagggctgttatcaggcactgctgaatccttgagaacctataattagagctgtctatttagggacacagcaaatgtcttattaattataaagaaaggaagcagacagattgtttaatcattgtccttgctgaaaggttatgcaattaactatataaatattcattaaaagttcaagcagccgcttgctgcactggggtctgtagaacctggaggtccaccctggaggtggagcgtacagccaagggccctttctgtcacctgggcttttgtgaggagagtttggggatggttctggagcatgcaggatttgatggaagggcaaggctctagtcataggaacccaggctcggtctctcgcctgctgtgcatctttgggctagttacttggtctctctgagcctcagtttcctcatctataaaatggagtgcttacgtgcaggactgctgccctgctgtagtgcagtaagtggcccaggtatgtagtaagtaagtggcccaggtatgtagtaagtaagtggcccgggtatgtagtaagtaagtggcccgggtatgtagtaggtaagtggcccgggtatgtagtaggtaagtaagcggcccgggtatgtagtaggtaagtaagcggcccgggtatgtagtaggtaagtaagcggcccgggtatgtagtaggtaagtaagcggcccgggtatgtagtaggtaagtaagcggcccgggtatgtagtaggtaagtaagcggcccgggtatgtagtaggtaagtaagcggcccgggtatgtagtaggtaagtaagcggcccgggtatgtagtaggtaagtaagcggcccgggtatgtagtaggtaagtaagcggcccgggtatgtagtaggtaagtaagcggcccgggtatgtagtaggtaagtaagcggcccgggtatgtagtaggtaagtaagcggcccgggtatgtagtaggtaagtaagcggcccgggtatgtagtaggtaagtaagcggcccgggtatgtagtaggtaagtaagcggcccgggtatgtagtaggtaaggcccgggtatgtagtaagtaagtggcccgggtatgtagtaagtaagtaagtggcccgggtatgtagtaagtaagtggcccgggtatgtagtaagtaagtggcccgggtatgtagtaagtaagtaagtggcccgggtatgtagtaagtaagtggcccgggtatgtagtaagtaagtggcccgggtatgtagtaagtaagtaagtggcccgggtatgtagtaagtaagtggcccgggtatgtagtaagtaagtaagtggcccgggtatgtagtaagtaagtggcccgggtatgtagtaagtaagtggcccgggtatgtagtaagtaagtggcccgggtatgccacttatgtgatgacctttgtgaatggcacccccggaatttgcactggcagcccgcaaggcctgcttaccttacaacagacatttgttgctcacagttctggagggtaggaagtccaagatcaaggcaccggcagtttccgtgtctggtgagggcccgttcctcatagactgcacctccttgcttcatcctcacgtggtggaaggggcaaggaggctccccctgacctcttttgtaagagtactgatctcattaaagagagctgtactgttatggcttaatcacctcctaaaggcctcacctcttaatgctatcacattgaggattaagttccaacatggattttcaggggataccaacgttcagaccatggcagaatgaaatgaaaaaatataaaattttcagcacagagcagcctgacacaacttaggtgttcaaaaactgggactcccctccccctcccttgagaggttctgtttcctgaggcctggcttagggataagtagttgctttgaccttccatcccattgctctcttaggggcttgcaagtgtatggaacatctgtatcacttttatcgtagtgaattgaaaagagatgaaacatcccttgtcttctatgcttgcagaatgttaaccaacccaggggttcccaaatagaggtgcatgggaatcccctgggttttggtggggagttactaaaatgcagatccctaggctctgccctagaagtctagattcagtcagtatgagctgaggctcaggaacctgcactttgagtagctccctcaccccccaccctttgatgagaggaccccagcaaagcactggtcagcttcagcttcctgtgttccagtggggcccagaggggaggtgcttacctggggtcctgcagtgttggtgatagaggtaccctggaaggaccccatctcccaactcccagtttcccttcaccaccctgcactgcagccccaaggtggccttatataaaaggcctttgagggttagtactttccagagctcaacctgacagttatttgctcatccatcccacaagtctgccaatcctcgagcaagggaaatttctgtgaaatgaataccaggaatcctgtattcccaagggattgccctgtactcatgaaatgcattcctagggataacgttggggacctcactttcaggggcctaagatgctcttctcccatggcagtagtggtgtccagggaccttgactcagatacctgctcccctccccaactcatctgtgcccttttctgtatcccttgtggtctctcatcccagctatagaaatgggaagaggagaaactggtctgagatcagagagcaaaatggagggcgaagcatgagtagcccactgcctccggggagaaatggattgtgctgagtctccggcatcagacacagctgactttcagtcaatcctaacactgctctttatcagctctgtgaccagaacttagtgcctaccaccatgtttgtcacacagcagtgctcaaatactcagtgaataagcaaaattcagagtcatctggtatgtgtggataatcatagtaggtaacatttagtgagcactgggctgggtgttcttctaggtgcttgctttacagacattaacttagtcatcataacaatcctatgagagatagtattatccccactttattggcacagagataaggattgttggccaaggtcacatagtcagtgagtgattgaagtaggatttgaacccaggcagccaggctccagagcccatgttctccgcctctatgctggaggccagcacataatcctctcaccctgctggcttattgtgaaaattagatggaagtgtctagcaccatgcctggcacatcctagagaccacggaggtcgggcctcctgcacaccctggaaggctgaagggagccaaccacggaggtctgagatgcatctgccttggctgagcctgtcacatgggtccagcagaaactcatgataagagctgtccccagccttgaatagggttctcattcttccttccaaattgagattcaaccctggggcttcaggcccctgattgagtcagcctctgattgcggctgcagtaattatagctatgcagtcccgctgggccctgccatgcagcagctgctctcagcagcaggatcagcaccatcactcggggagggggcttagaggcgggccgattggagccgttggggccttggtgagccctccaaatttacaggttccaatcatggagtcactgatctggaaggcaaactgaggcccagctggggcatatctcacctaagggcacacagctgggaaatggcagagaagagtgcagggcatggtggctccatgttgccagaacttaaagtggaggtttggagggatgggaggtgtggccaggaggggcaggcagaagtcaatggatcaaagggacttgagggccagggaccagggggccatgaaagatgttatgtagagaagggtcagatttaggatttgaaaattcctggcacagacagaggcttcttctcagctgatgaaactgagacatgggccagaagagccctgatggactcctagggccttggaccagatggctggaacagggtggtaggactggttggcaccatgccctgtgtcccccttggctaagctatgcatggacgtctgtctccacagccaagcaggtgtgtcctgcagagaagctgagctgtggacccaccagccacaagtgtgtacctgcctcgtggcgctgcgacggggagaaggactgcgagggtggagcggatgaggccggctgtgctacctgtgagtctggggtcagatctccagggtctgccaagcatggtcaggcagcctcagggagtggcagccacttctggggagggggcccagttccccgtggggcttggtggtggagaggaaaggataacgatcaggacactagtaatggctagattctatggagacatggtcttctttcatcttcacaagcacctcatgagcagccattatcatccccattttataggtgaggaaactgaggctcagacaagggaggaaaagtacccaaggctgagtgatgaaaccaagattcagattcaggactggacagcaaagcccatgagcttttgttaccatgtctgacatctgctcatccatcccacaagtctgccaatcttggagcaagggcagggggaccagggagggtgctgcgtggagaaatggcggtggtctgagccagggcgccagcaatgctggggggagggggacggattcctgaggtgtcaaggacgactgttgctgaaatctcagattcaagcacagacgtcacagggcagagaagacattctcagcagcctcggcagggacagatggaagtggtcactgggacagttccacatcactgagcttcaaacacaggattatctccttcccagggagcaggccagcagggcctgggccattggggagcatggccaggcctcactttttcaattcgaggggcacctactgtgtgccaggcctgaagccaggctctgaaagggacagtgaggtgaatcctacacagtcttccctctgggaacacatgattagtgggggagacagactggctgtcgctactaggctgtgcggctgggctgaaatacgggcggtcaccctggagggcttgccaggcacttgcccatcactgctgcctactcccctctgccagcctctatatttgcatcctatccatctttcctggcccagggaaaatgccatctcctccagaggtgtctgagtcgtcacactttaagattctaagtctggaatttgatgtgtctgaagcaggaagcatctgggtatggagggagatcctggctgggaacagcagtttcaaagtcccagtgatggcactggctcacttcctcagctgtgataattttgctgggactcactggccaatgagaatcctctttcctctttaccaagccccataatcagatgattcctccaatatgaaggccgctactgcaagggatgggagtctctccaactagggcatgttggaataggaacattccccattaattatgggagagagaggtgtcagaaggtcttactgggcttctatgctatagcttccaccctcctaggcagaggaaagagtcctcccacccctcatctctcagagcttcttccgtttgtgagtgctaggagtagggtctctcggcctacgtaggcctgagaatatggatcttaaagttactgttggctccaaaacctcagagaaaactcagtatgaagaagcacttccttgccatccaagtcttcaagtaaaattaaaaattaaggcggggcgcggtggctcatgcctgtaatcccagcactttgggaggccgaggcaggaggatcacgaggtcaggagattgagaccatcctggctaacatggtgaaaccccacctctactaaaaatacaaaaaaaaaaaaaaaaattagccgggcgtggtggctactcaggaggctgaggcaggagaatcactggaacgcaggaggtggggttgcagtgagctgagagcacaccactgctctccagcctgggcgacagagcgagactccatctcaaaaaagaaaattaaaaaaaaaaaaaaaaaagcacttcccatcagaactcccagaaagcagtgagtccaccctccctgcacatgcacaagttgggtggggacaggcaggaagggagctcatctaggtgtcagcgtaatattgaggggcagtggcagtggcagcatgtgctttttccaccaatgccccagtgtctcaaaagcccaggaggggaaaaaaattcaactgtcagacacttggtagagctgtcagaaacgcatgacacgagctacctacctggtgaaactgaagacatcactctattttatcttcaataacaatgaaaattcacatttttccatcagaaagtgaaaacacagactctgggcgcccccacgtggaaagatctggtgctgccaccaccacctcacctttggccacagccactgcatcagtgccccaccggggcctacccccatcccggggccaggtcttggcctgtgtgtggacgcacaggagggagggaagtgaggaggtcactgccctgaaaaacagctggaaaaactccaggaagggaggagaaaaccagaaaagccaagaggaggagtcagagtaggaaagaaaagccccaaatgtgagttctggttctcttgttgtcatggactgtgtgaccctgggcaagctgctcctctctctgggcctcagtttccccatctataaactggcaatagggctggctggcctctaagttcctcccggccactgaactcagactagcctaccagagagaagcccagagccccaagcagagccatgacgtgtgtccttaattactgcacatcccataattatacctcatacctgggccagaccagttccatccactccacacccactcactacagggagctctgtaccaggccctcaggacaaaggagggacacccccaggcagtgtggattcttggggcagattgaaaaggacatgaaactcagacgcctgcgcgactgaggggctcagaaacgagggcagaggcagagatttcccaagcggggaaacgccagggtgtcatggaagaggtggaatttgggcccttggaagatgagagctcatcattgcaaaatgtagtggtgggcaagaagtaggttcccagcagatggagcaacttgagtaaaggcttggaggtgggagcctgtgcactgggcccagcaaatggtctagcatggcgggagctgcgaacattcaggagtgaggtgatggagccacaggactgacccaagagacgccttggataccaggccaggggactcaggtggaacagtgcaggttatgctatgcatcgctatgctatgaggagccaaccccagaccctggtccctgggaagggtcagtgtcatttaacagatcatgtcctgggaccatagcagggtccttcaagacaggcagtgctctaaggtttcggaatccccctcctagtcccaccatgctcatgctcatttacccagtgaggcctggggggctcacaaagggcaggtgtgttgccagtcacctagcatgtccgtgttggaagcccgccttcgctatgcctaactgcacgtccaccattcagcccccaaagggcacttgttctggcccccgggtgagggtcggagcccctgtagccggaccagcggggccccaggtcggccggggagggggtcggcgggccgaccggctctctgtcccgcgcagtgtgcgccccgcacgagttccagtgcggcaaccgctcgtgcctggccgccgtgttcgtgtgcgacggcgacgacgactgtggtgacggcagcgatgagcgcggctgtgcagacccggcctgcgggccccgcgagttccgctgcggcggcgatggcggcggcgcctgcatcccggagcgctgggtctgcgaccgccagtttgactgcgaggaccgctcggacgaggcagccgagctctgcggccgtccgggccccggggccacgtccgcgcccgccgcctgcgccaccgcctcccagttcgcctgccgcagcggcgagtgcgtgcacctgggctggcgctgcgacggcgaccgcgactgcaaagacaaatcggacgaggccgactgccgtaagccccctccataccgcccagccccgcccagggattgcggatccgctatccgatccggatccgccaggtgcaggcttcctttcattgccttacctgaatacattacccgggtttactacagaggagaccgaggctgggagaagtgaggtgacttatttgaattcacgcagctgccgggctgcggagctcaggtctaactccagaagcctccactggtatctgtgtccctgctgtgagccctcccagtcgtacttcccacccccatcccccgaacccctccacccagaaacctggcaggctcaggagctccccccatctctttacccgctaggcctgctcattcctcaaggcctggcctagactcctctgaccttcccagctgggctgggtccctctgctgggcaggtccccagcagctttctcttatagctcatctcacactgatgtccccatctgagcattcctcacccttgctctgcaccctgagctcctagaggatgaggaggctcttaggagtctctgggctcccacccccacctccacctctcccagcacagcacctggcacaggaaggtttgccaaatggatgaagtcattaagtaatgagcaccaagactcaaaagaaggccgtgtgtctgttctgaggagtggccctggagagaggcagggacagggaaacaggagatctgggtttagtcctgaatctgccagccagagtgctgtgtgaccctgggcaaggccttccccctctctgagcttcagtctccccatctgtacactgaggtgccttggccaggtgtcctttgaggactcctgagttcagccactggttctgtttttgctgggggtggctatggcatggggattggggtggtggggaaattgtcctagcaccacactgactctgatcctctccccttgccctctcctggcagcactgggcacctgccgtggggacgagttccagtgtggggatgggacatgtgtccttgcaatcaagcactgcaaccaggagcaggactgtccagatgggagtgatgaagctggctgcctacagggtgcgtgtggtcagggcacagaacacatcctctgtgaggatgccctaggctctggtaactctccagagggcagagttgggaggagtttccccttggtccccaagatgcattttcccccagagcatcacttgcccctaaatcacctggctccctttccatggggtcctagtagcaccagaactggatttgtaaggactttgccaaagctgaaagacacctagggggacatgacagagcacttgggaagtccagcccccaccacttgtccaggtcccagctggtgagtggcttccctcactagttcccaggctgagcagaggctgagtcttgctccccagggagcccctttagttctcagatggttcttctggtcaccacctgccctctgcaggagcagggaccctcattcactagtcatcttggggaatggataacaggctgggcagtgtagcaacttcccctatccggggtccatggggcaaagtccccccaggagatgatcagtccagcctctaaggtctctctagagctgctgcctggtcctcctaggacctgagtcctgcaagatgagacgcagatccccacagccctgcccagctacatgaggcttagcctcctaatcatccctgggatcctgtcctgtgagcagagcttcctcagttcctggatttacctgtctgtcctgggccaccctccagggacctgtgagggactggaactggagctctgcttgcctcctgtgggccccagcccagcccttcttgtccaaggtctcacaggcactgtccactctcttgtccggcccaacagagtcaccctgtgagggtccccgcagatttcagtgtaagagtggcaagcgcgtggacggcgggaaagtgtgtgatgtgcagagggactgccgggactggtcggatgagcttctgaaagtgtggtgcggtgcctgtctacgcccactggctggactcagtctcctaccatccccctcctggtatctaggctcaaggccctccagtgccccctgccctgacactttctgctctgaccctctctttggattcatgtgccgtcctatggcttcacatggggcttttcgcccccaggcctctggtctacatctctacaaagtgctaagagcttgtccatcccaggtactaaaaaattatgttttctctcacaaacttggcctttcctcattccttccccgttcagacctctgagaccttctggaactttctctcttcctcggtgttcctcccctgctgacccagccaaggccctgggctctgaggtcttctagccccttgcagaagacccagcagagggagaagtgggcacagcaggcaggcagccaggtgaagcacatcccagggccactgctcaggccatacctgtgtgggagtaaggcaggccttgcagcaggaggtggcaccatcctaagccctgaggagttcggacctgatggggagaccagacttggaggccagactaaagcgagacctggatggaagtggctgccctgatgtcggctacagctgtcagggtgggttccaggctagaaagaacagaggctccaggctgtaggtagggtgggcatcccagagaacatgctagaaacccagtgtggactccaggaaggttcatgagtttttttttgttttttgtttttactgttcccaggttagggcttgagggagatttgacagagaagccctgggaggacagaggctaggtcagtccctccctttcctgccttctggcagactgtttccccagcacctacctcctgggtgcttagaggaggttcatcctcctgagcttcccaggaagagcatatttccttccccttttgaagattaaaaaactgattgtgaaaggaagagtagttgagtgaaagtgactcagcttctacctgagctggcaggagatagacactccctctgcctccaggccctgccaagagaagtcccagaagaaggaacttgtggaaaaagagacagggaagccagaactactgagcctagctcccccaacacccagatttggagtagccagggactactgtcctactaatccctctcttctctctcgtcgtttgcatgacacaccaaagaggagtacgtacacacgtgcttgtgtctgtgtgtggcctctgtctctgtgttggtgagaggccggtgtctgtatccatgtcttcttctctgagtaaagcaggggaactgcattcatgcatctatgtgtgtgaccccatgtatgtgtgaatgtatctatggagtccatgggactgtttgtgctctgcacataagctggtatgtgtgcatgtagttgtgggcatgctggtgtgtgcatgtaggtgtgtgcagtgacaccacttcttccttccatggaaggaagccgcaaatactactctggcctctctgcaccactctaccccatccccctcctctcctggctccccagcggaatcacacccaggctaggtagaattaagaaggactgaagacttccctgcaggcatttggggaaaggttacagggacagacaggtgcagacctgctctcctttctcttcccctcacccacctgagccctggaggactctgtgccttccttcatcagaagccagtcactttgagttctctcctttccccttccccctttcagggccatcccacctacacatgccacttcatcaagtgctcagtaaatagaattgttgagttgttgctagctgcaaaaggagaggaaggaggcgagtggatgcatgatgggggcagtgggtgagtgggaggacagatgaatgaacggtgctcagggaataacacaggaaaggagaggtcagggagggctccgagcgactgaaagattcctagaggtgggagctgccgtggctcagcccacctccaagggtctgaggcttcccagggctgggcctggctgagtcatccctgggtcccccagtcatggagttgctgtggtcttgttctttcagttccgccaacattcctgggaaacaggaggaggcccaggggtaaaggggttattccctaagcatggctcaggctggaagtgggggcaccccatagctgtgcatggcctggggtgggcagctcagaccagctatatgcatggccatggctggctcagctcagcactgcttggcttggctggagtggcagtgcatgagcctggggggcagagggggagaggggcgcggcacctctccttggcttgtggaattaaccttctgtgactctaaagctcaggagaggctgtaagagcattggtcctggattccctgacctcccctaagaccctgccagaaggtagtgagggagtggaggatggggaaccagaaccagatgacctctgggcatcccttcacctcttgcagcaggtggtaatcctggaaccgggcccatgacaagataggaggaacagggacaggtgctgagaggagaggagttaaaaaacccatcatattagttcatgataggagagaattgatttagcaatggctccatgttaaaaaaggcccaggagtcttaaataaccacaagcacattagggggggcatcctgtgttgttcaggttccttctgggtggcaaactagctctgggccctgtccagacagggacatggacagatggagtgagtccagagaaaggcacccaaatggcaggagaccagatatcagtgctttaagggagcctgtgcaccctggccaaccccacacagcagagctgggagcacaagcagaagcctcagcaggcagtgctggtccacagtggagccagctgccccaggagggaagtgggctccctgaggctggagatatttaagcaggggcattttggaagggattcttagggtatcctgagggttggatgtgacacacacaggacccttcaactctgaggtcacgaggaaggaggcgctgtgagaaacatgtttgtgaaaggaaagaccttgggccactggggaaggcctagctgcctccagcttggtggtggacagagccccagccgggaggccggggacctaagttctggttccactctaccctgtctctgtgtctggcctggagtaggaacctgccctctctgtgccgcctgctgcccagaacacctggtagatgaggctgaggctcagtgaggttgtggagccctcctgcctctatgggagtcccactgccctgaggctctgcttctgctctaggtcctacccctgccctgcccccactcctcctgggctcctggaccttcaggagcccatgtccctccccagggctgaacgagtgtctgcacaacaatggcggctgctcacacatctgcactgacctcaagattggctttgaatgcacgtgcccagcaggcttccagctcctggaccagaagacctgtggcggtgagaccttctcccacacccccaagcagaagcagatcctcctgctggttctgactcctgctcctccccacagacattgatgagtgcaaggacccagatgcctgcagccagatctgtgtcaattacaagggctattttaagtgtgagtgctaccctggctacgagatggacctactgaccaagaactgcaaggctgctggtatgaacaccccaagggcagaggggcagctctgaaaggcatacaggaagcagcgtgcttccacttgtgaggagtgggcgtgtacatgtgcgcacacacaagaaggcaggttgtgttactgagaggtacgggaatcctcggtcccttgtctagcttgggagaaagaattcagccaagagacaattagtaacataagccgaaggtttattaaggagataagagtacaatctaagacaggagcaggctgacccagctgggagcagcagcaatagctgtgtttctttaaagggacagtgcactctgaaaggtgacgcagagtgggggcagcctgctaaaagagaatgaaccagcggcagccctaagagttctgcattgggtttttttcttgaagttcctgtctctgtcctaaatctctgccattttctttgtctagttttcccattcctgctttaagtccctgcctgttcctcacctagttcccacccaggcttgtgggacctccccttactattagcttgtgtgcatgcccagctctgggcacaaatactacctaatggtgccatcactcgttaccaccaccctaggaaggttgtatagcagtcaaatctgattgggcctgcatatttcttagggatttcccctttgcccttcccctcctcctcaacatgcagctagctacattctgatgggagaactgcagagtgagcagtttctgggcatcttaaggggcattcctttctgcagaggcatttcccctcctctctgctcatatctagcatgaatgttttgggtggtctctaggtgtgagattttctagacttcccttttctcagggactcccccttctgctcatgtccagctgtctgcctactctagcagttgcacacacagtgctcaaaagtgtacatacacatcacacacacaacgcactgcacactaacacccacacagacactgtatagagccacccaatatagcccacagagatgacactcatacaacagaatatgaaccacacagagactacacacacagcatatggagtccacacaaagagcacgacctgggcagacctacacattgatcaattcagccagcagaattaattcattgtattcagttgtttatattgaacacctaacattgtagtagacactggggattcagcagtaagcaaaacagatgcaaatccctgtctgccctcaagggactcatattctaatgggtgagccaggctagaaatcagataaatacataaaatatagtgcatggcagatggcgataagggctaaggaaaaatagaaagtagagaatgggaatagggaagtccaggtgagcagggggttctagttttaaatggaatggtcagggaagccctcactgagaaggtatttgagtaaagaaggtgaaggggggtgggtgtggtggctcacgcttgtaatcccaacactttgggaggcctaggcaggaagatcacttgaggccaggagttcaagactagtctgggcaatgtagtaagaccctatatctaaaaaaaaatttaaaaactagccaggtatagtaccatgcacctatagtcccaagctactcaggagactgaggcaggaagatcccttgagcctgggagtttgaggtcacagtgagttatgatgccactgcactccagcctgggtgacagagtgagaccttttctaaaaaaaaaaataataataataataaataaaaagggagtgagggaggtgagacagtaagctaccatgcaattatctataggaacaagcatttcaggctgaagagacagaaaccgcaaaagccctaatgcaggagcatgcctagtatgttcaaggaatagcaaggaagctggtacagttggagcaaggaaactaggaagagatgaagccagagaggtggcttggggcagcccaaagggccttctagaccattgtaagagccagctctggatttcactctaactggggggaaaccattgagggctctgagtagggaagggacatggtgtgacattttattctgactgcagtattgagaacagactgtagaggacaagggagaaggcagggaaaccacttaagaggtcattgcaataatccagaagcgaggtgatggtggctgaacccttattcccacattattactgtgggaataatgaaaagtggacagactgcagatatagtgcaaaggccagccaacaggatttgcttatgaattgaatgtggaatgtggaaaaaaaagttacagcaactgaaaaaataagattgctacgtatgggcttgggaaagatggtgagggaagcaggtttggaggaatcttaggctgttttggacatgttatgtttaagaaaactggttaggtatccaagtagagatattgagaaggcagctggatatatgagtctggagttcatatgcaagttaaatacaatatacaacagataaattataacaatacagcagccataatactgacatgtagcccataaacccaaaaactgtaacacccaaactgtacaatatgtaactcatacattagtatatcacatataacgtgtaacctgttcttgcccccatatagaacacatgtaatacatgacacagattatgtacatgcactggagacaacatgcaactacccatgcatatacaaaatccacacacatgaatatttcaagtgcagttacataaaatctcaaatcataaacacagggggttcctgtcacagtcacagctgtcatttaagatcactccaacatgcccctttaacctggctcctgccttcagggaggtgaagtgtcattactgtcattttggggtgagggaaatcacagcttgtcagtggcagagctggcctgtaactcagctttcatccttgccccttcctgcaccttgagcccattctccatgctatttgtaccacacttctgtctcactcccaccctgctttgaattagtctccatcactacacacaggtcacacacccagccccaggccctacctgactctgtgctggtcccatcctccagggagcacattagcttggcaaagatgcacagtgacagggactggtggctggcagaagtgtcagctggaaaacaagagaaggaggcacagggagcttgaggggcaggtgttactaggagcagcccctcagacagtgttggtgcctgagagtggcccaatacatctagaaacagcctgtgggagctggtgctaggccctcagaggcccatgggacagtgtcctcccatatggagtagccaggaaagtctaggtcacttatttatcatcttaaaatctaaccctaaatctaagaaaaatacaggttttgtgtatacatgagcagtttatgttgtctctactgcatatatataatctgtgttgtatatcatatatgtcccatctctgccattggctcaggatagagaacaaactcacccagctcataggaccttttgtgatctggcccctgccaatctctgaagctcatctcttgctatgtccccaatactttctatcctgaatcatctttttttttttcctttgagacagagtctctgtcactcaggctggagtgcagtggcacaatcatggctcactgcagccttaacctcccgggctcaaatgattctcccacttcagcctcctgagtagctgggactacaggcatgtgccaccatgcccagctaattttttttttatttttatttttagagatgggattttgccatattacccaggctagtctcaaactcctggcctcaagcgatgtgccagcctcagcctcctaaagtgctgggattacaggtgtgagccactgtgcctggcccctagttatctttctaagacacttacttgctcaggtagttccttcttgaaccacagcagtagggcccaagcagagaagatgatagttgctggaaagaaatacatagtaggtggaagggacaacctgagcaaaggctctgaggcaggaagcccatccatggctaggtaatggtatctggtaggtggaatcaagctatgttggagaggcgagtaatgaggctggacagggaacttggggtcacactgtggaaggctttcagtgcaggcctaaggagaaaatggggagccataaaagattttggagaagtttgtatctaataaaaagaataagaatcttcctgctatgcgtggtgctctgcatcttctgctttctgtactcattatttcatctgctcctgcaacctgtaaagtaggaattgtcactactattttaaggaaaatggatgtgtcagccagcaagccagtggcagagtcttggtctccaggctccctgcctcttgcactgactctttctctttcaacctccctgcatgacagctggcaagagcccatccctaatcttcaccaaccggcacgaggtgcggaggatcgacctggtgaagcggaactattcacgcctcatccccatgctcaagaatgtcgtggcactagatgtggaagttgccaccaatcgcatctactggtgtgacctctcctaccgtaagatctataggtgagcggccatatcctctgcagcaaggcatgaagagtgggggtgaggggtggtgacaggtgaggaggggaggagtggtgtctgcctctagagctcctcaggacagagttgggacttgggaagagatgcaggatcacagtggatatggaacttctgggactttactggggctggagtagtctgagggctcccttgggttagcagctttgagccccaaacacctgggatttgtctgacctctggaggcctaatatggaagcacaagacacaggaactgtttggccagggcagaaaggaagaaatcctggctttggggaggactttccaagcagctcacatccctgtgtgttggaacctggggacttagacctggtccctgcccagaggatcccactcacaacacagtgacatccatttgtgatgatcatgagaaagtacagaggaggcctccgaacccacctgggcatctgatctggcatgccttcctggatggcatcaccccaaggccagcttttcactgtctttgacgccacagtcagtggacctggtgcttgggaagctcttcacacactggaggaggttctctcctaggactttctcagatgccagcacctgccccactgcatgtctgggccctcttcaggcagtcatgtcctttctttgtcctgagatccacttggcaggaatgccgatgaccaggcgctgggtagacactgagtcactgatgaaagaatgatgggacagatgggtggaagagtggatggaagcaaatatagcaagtgctactcactgacaactagattcctgcctccctgcaacatacagacactccgttcacacacacccaaaaacataactagaacaatgcctgtccaagagatgtaactgaaagaggcaggatttggtgacagactagatatggggctgatggaagaaatttactccttcatagtgaattttgggagtttcaggtttttggcttgggaggtttcatgaatggtggtgctgttctctgatgtgtgaagcagtagaggaggatcagggctcagggtttgggccgtctggttggccgaggggaagggaatggggatgaacagttttggacatattgagttcaaggtgtccatgggacatccaaggggagctagttagctttgcagtctggatcgtaagagagctgttgggattggagacttagttattgatggcagtggacactaaggaactaatcacccagagagagggcaagaagaagaaaacctctggggaaacagcatttgctattttgctaatgttgcctcctgagtgtctactgtattcttagcccttctttccattctcactggcacggtcattcttcagactctcttaatctcccacccagatgctgtaacgtcctcctaaccagtttccctgcttcattccctctccttccaacccatccactccatagatgccacagtgaactaacatgcttattggactatatcctctggcctgtctagttatcactggggagaaatcctaattccttggcgtggtactcaaagcccatcaagatggggttcctgcctacacctgcttgcagtctgacacccacataagcagctcccctaagtatctcactgttccagagcagactcacctctggccatttgcacaagcctttcttgttccctaatggctttctgtcctggtgacttcatgctcctggtgaactcgtccttcaggactcaactataaagccttctcccgccctctcggatgaggcagtctccatgcctctgctgccatagcctctaatgctttccataatcacattgtattatatctggctcaccctaatgggcagagctgtggagcagccccaccttagaaagccagagaccgtggcccatgtaagtctgtacccctaccctggtaccccagggaatgtgtagagtggaaattatccacgttcctctaaaaatctattgccatggcccagatggaagagaggggaagggtgcacaggtagctccagatgggcccatgggtggaacatctgccccatggtcatctctgttttctcttaagcgcctacatggacaaggccagtgacccgaaagagcaggaggtcctcattgacgagcagttgcactctccagagggcctggcagtggactgggtccacaagcacatctactggactgactcgggcaataagaccatctcagtggccacagttgatggtggccgccgacgcactctcttcagccgtaacctcagtgaaccccgggccatcgctgttgaccccctgcgagggtgagtgtcccaactgaacttcccattctcccaccataggtgctcagtcctcttgtgtctgtcacaagggctatcttgagggttctagaaagctctgggccactcagacacaggccatggggaagaaagtcttgttaatccccaaccaaggttctctgggcattggtcaccaaagttctccctggactctcccacccactcgttatatcgtagaattggagtgtctcagagcagagtagggctctagagatggcctgatagaagctcctgggggaggaagcctttcttcaggctgctgtaggtgagcatctgacagctgctcacatacttccaaagacaggtagctcattacctcccatagggcctgtttcaccgtggggcagctctgctcattagaaagtgggtcttttcccctcataatgccaaatctatctccctgcaacttcctccattggcctctggagttacataaaacatgtctattccctgccctgtgagagagccagcaagatttgaggaccaagatcactggtctgttctgcttcagactgcctgcctccatccctacccctgttgcctatggtctctgggccctcaccacctaggttgccctgctctggccacccctcagttttgggagttagggattctgaacagaacaggactccctctctccctcagtgtggatatcttgagatggtttttttagcgttatatcatgttaagtttaacagaatcaacagctgcttcctactgctatttccttgttaaacagggataagaaaaccctcttcttcgagcaagggcagctggtgaggggagtaccacatgggaggttatgtgaggccttgggaagtgactgatagctgccattcactaagcatgggtcaggtgcttccagcacagaactaggcactctgacagatacggagcctctcctcttaccctcacttcatccctgttctctgtctgttctcatgcagaccttgtgttgcacctgccacatcctgtccctcacatcatagagttacacccagcccaaccccaatccactgcggatcgtcagggtcccaggaggaaacccactgcatactcaagataatcagaggagggtttaataaagggactatttacaaaggagtgggttaggtctaatttactaccttggattagtaacagtgggctgctactggccctagtaggcctgaggagacaaaagcagggagggttacctgagttaggaagctcatccactttctcctctgaaaccagaaaagagagggcttactagggccttccccacactgacaccctagggctctagttagttagcactgccagaagtgggagagatggggtcacaggctattcagctgagtctgggtgcaatctcggagaatagttttcctcaagttctcaaatgaggtgaaggctaaagtgcctgctaaatctaagatttgatggttcaaaagaactttagaggtcttctcagtccctactaaacataaaccacaactagtcaatgggttattgagctcttgtgactcagaccaccccggtcatgtccccagcaagaaggcaaattgggttattttgtcttttaggttcatgtattggtctgactggggggaccaggccaagattgagaaatctgggctcaacggtgtggaccggcaaacactggtgtcagacaatattgaatggcccaacggaatcaccctgggtgagccctgcctttcctgggttgggggcctattctagtgccttgtcctgatcactgtctggaactccatgagtcttgtttctgggtcctctcatggtgccagtgactttgtttcctaatggttgccgtaggctggcctcagtgtgaggcctagaaatgtgggcagggagaggtacaaaggaacagagctccagactggggtcccaggttcatgacctgatcctgcttccttcccaagatctgctgagccagcgcttgtactgggtagactccaagctacaccaactgtccagcattgacttcagtggaggcaacagaaagacgctgatctcctccactgacttcctgagccacccttttgggatagctgtgtttgaggtgagtcctgtaaggagaggcaagggcccactaggaagctgaagcctagaaaatgcttgttcaaataggatgagtccctgagacttgttcaaatgaaaacaggaacagggaaaccaactgatttgtttgtaaacaatctgtgagctgcctgcacacaaaggctctgcagcccactctccacctggcagcctttcccacgctctcttcccaagacccctctcccagagcacttctcacaggtgagctgctaggcatgtatgtttcctctctgtgccctcagcacccagcactgtaacccatatacaaaaggcacccagtaaagggaggaaaggaagaaggaacatacatatccttagaatcatttactggaggaaatggcctgagagatgctgttcaattctgcacacttttattgacctctgccagaccctggggtcatagaagtgaatcagacactatcctagtctcaagaagctcccagcaaagtgaggagcgaagaccctcctgtgccctgaccctaatgacttttcttctccgggaatgaagaagccagaaccaaccaaggtctcacaccttcacctcttcccgaaaactaactccaccaccaaggggagggaaagcaaagggatgatggtctgtggtgggcattggcaggatttgcttgcagcaaagttactcagcactgctctgaagttgtgggcaaagctccacctctaagtccagcccctgctttaaaggacaggtgtgttggtacacaagtgtttgtgcttgtttatatacatggcatgtacatgtaaagtatgtgtatgtgcatgggtaaatataaatgcatcagaataaaagtgtgcattcctctaagtgctggtgcttatgtgtgtacatacatataccaagatgtatatagactgcatatttaggggcaaatgtagctttttgtgtgtggatgaacatttgggtatgtgtttagatctgtgtatgaggatgcacagttgtacctgtacgtgtggatttgctgacagatgcacatctaggcttatatggactaaccatgtggactcgtgtggatacccagaggctacaggaagcccagcaaggcataaccctcatagctcacacattccttccaatcttggtcccaggccccagtaatgataatgctatagagatttaaccttgggtttctgctgggctctagcaagcaggcttagttcagcatgaatgagtaatgttgtggctgtcagttcaaagcacagaatcactgaataatcctctaagatagaagggaacaaggagacgtgcatcacagattagaggctgagagccccaccgtgaatccatagacaggacagatcaggggagatttcagggaagttcttgtgactatggtttggggccaacccctcagactgaggtcatggatttacactccaggcctcccatcctctgcatctataccccacaggacaaggtgttctggacagacctggagaacgaggccattttcagtgcaaatcggctcaatggcctggaaatctccatcctggctgagaacctcaacaacccacatgacattgtcatcttccatgagctgaagcagccaagaggtgagctgtctctggtcctaggtcccaggtcccctgactgtgtcactgtgtcctctcctttcaccaggcaggctgtgttcacattcaggtcacaactcagcaaccccaggaataataacaacaatccctcttgttggtagagtactttttcatcatatattttgtctcattttacctcaagttctttgtgaaataaggctgggtataaatgaatacataactgtcctgtttttgccaatcctacaaagtgtgggtattactcttctaacagttgaggaaacggaagctcagagaggtaaaataatgttagcaggtggcagaactgaaacctaaacccaggtctatctggttccacagctgctttcaccatgacacactgcatctaacttgctatttgtagccattctgcagtagtataagctaatgtatccgagggccatataataagtcagcttattggttgggaatagaatctaggaatcctactactaggttgtcccctcctctatcactaggatacattaattctaactgtaactgaagtgttggctgccagggtgaaagagggagagcaagggagtgtaaggagctaagattggtgcctgattctagacctagaaatttaaatgagagacatagtatgtggcacagggaaaaataaaaaccgcgggcttatgggctttggagcccagccgacctcaatttaagttctatctctagtccagacatggtggctcatgcctgtaatcccaacactgagaggctgaggcaggaggatcccttgagcacaggagctccaggcagcagtgggctatgattgcattactgcactccagcctgggcgacagagcaagacccctacctcttaaaaaaaaaaaaaattcctagagtataggtttgacgaatttgttctctttgagcctaggtgtctttatttgtcagtctgggatgtaacgtccccacctctcagaattgttgcaaggattaaatgagagtgtagggataaaacactaggtatggtgctggaaagtacccaataaaagtagtagggaggccaggcatggtggcttatacctgcaattccagcactttgggaggccaacgcaggaggatcacttgagcccaggagtttgggaccagcctgggcaagaaggcaagactctatcactacaaaaactataaaaatgacccttgtatggtggcatgcgcctatagttccagctactcgggaggccgaggtgggaggatttcttaagcccaggagtttgaggctgcagtgagctatgattgcactgctgcacttagtctaggcaacagagtgagaccctgtctcaaaacataaaacataaaaaaaattgaaaaagtagaagggcttcacaattgcagagatgtggaaccaacctaagtgtccatcaactaatgagtgaataaagaaagtgtggcatatatacaccttggaatactactcagccataaaaaggaacaaaataatgtattttgcagcaacttggatggagctggaagccattattctaagtaaagtatgatagtagtggaaaaccaaaaactatatgctctcacttataagcaggagctaagctatgagtacacaggggcatacagagtatagctaagctatgagtacacaggggcatataatggactttagagactaaaaatggagaaggtaatagcggggctagagatttaaaaaaaaaaaaattacacattaggtacaatgtacactacacttgggttacaggtgcgctaaagtaccagaattcaccactatataattcatccatgtaacaaaaaacgtgtatcccaaaagctttgggggataaaaaaagaaagaaaaagaaaaaaaatgtgaaaaaaaaagtatagggcaagctttttgagcaagccaggtgggagaagcctcatcctcaggaggcaggaagacctggcatgtcctgtctgtgccccagctgtctccctctctgccattagctccagatgcctgtgagctgagtgtccagcctaatggaggctgtgaatacctgtgccttcctgctcctcagatctccagccactctcccaagtacacatgtgcctgtcctgacacaatgtggctgggtccagacatgaagaggtgctaccgaggtaagcagaccttccaggagggatggcccctggcagtgtcagaccctaccctgctgaaatcttcccttggcttctgggacacagtatgctgctggttttcttccatcttccctggttacttgttgccttttgggggtttctcttttttaccttccttgaatgctcatgcccccaggatccttccaaagctttttctcactcccaaggaaaaaatgcacatatacataaaacattttaaattcagtttcagggagtttctggaacgctttaaaaacctcaagttaagaacccttaatcgccgtggcttcaggtacatgcagataactatatatttgcctgtttctcacctagaacttaacaaacactacacagcagcccttttgcaatataattgggactaatagttaatacttcaaccgcatacacagattcatgtcctaatcttgatgtatagccaaggcctttcatttgagcctaagtctactgcattattaatgatttacaggttcaattgtttaaagtggaataagaatttcaatctattggtataacaatatatgagtgtaaaatccttctagatttatctgatttcccctccctacagtctttttattgctgatcttacaactaattccacagcaatgttttaatgactcatctttattgaatcaaagtgaagtgcttagcattcagctaaagaaaagatcatagcccactggggagattaggaaaggcttcacagaagtggcatttgagctacgccatgaagataagttcctaagtatatctcagaggcaataccttaggcaacaaaattatctgtccaagtgacctccatggtatttcccctccagcacctcaatctacctcaactacgacgttagcttctaccatgacgaggacagtacctgccaccacaagagcccccgggaccaccgtccacagatccacctaccagaaccacagcacagagacaccaagcctgacagctgcagtcccaagctcagttagtgtccccagggctcccagcatcagcccgtctaccctaagccctgcaaccagcaaccactcccagcactgtaaggaaatgagttctgcattctttcatgacatgggagggctcctagggaagccaggaagggggtatgtgataagacagaacctaccagagctgaatactgcatatctttgaggaggttactgcatatctgagagggaggtagagtaccagcctgcgatttaggactcataggtgcccctaccttacagagggtcttgtaggaagctgagaccctgtgagcctcagttgcttctcttacaaagtggaaataaccacccttccacaacctgcttcacaagattgccatgatagacaaaggtgtaaccggtataactggaggtgctcacgcacacagccgttgctgactctgcgagggtgtgtgtgtctatgtttcacaaagttctgatgtgtatatgaggaggtgtcccttgtgtttggaaagctctgatctcagttcacagcaggtccccagatagtaatatctacaaccatggtctccttatacctctttccaaccctgggatgaaaataattaagttcaccacttattaaatcattgggagcagtaattgtcactgctagaaatgttctatctcattaatcagcaaatacctttttaattgagttacctgccagagggagttcatttaaaaggataaactatctttttaattttttcccctacatggacagcccagaaaccaagctgcttggcaacatcttcctaactggtcctatttgccagcagaagctggctttttggagtggagcacttactccgaagtttgcagaggcagatggagcatgtgtgaattccagttcctctcatctgagggcagagcctctcaccagcttctcctcactggcttcctcatgctctaggttttaatatcactgtccagtgttcgctgtggcccagagcagggaggacagcagggaggacacagttagctctggaagcaagcagtgcagctttttctccccttaactgttagattctcttggagtaacatggataaacagtcacattgagagaggatgggccttgggccattgccgggacagtcatctcacctgcagcaagtgtagatgatagctccttttcacaccacagggagctgtcaggaggatctaagggaaaaatgctttctgaactataaagtgcttcacaaatgttacaatgaagatggttataagagtgagaaagatggcatggcatagtttttcaaaaagacagtaaattttccaagcacttttcagtttaaaatgtgcttttacatatctttttaaaatttagaccctattcaacaaccccatcccactctccaccctcttagaactaggcaaagttgtgccaagcattttatattcattttagataaattatttcatttaatccttaccatatccctaggaggtaggtaatatcaccattttaaagatataaaagtataataccatgtgctgtatttataatatataataatttgcccaaggtcacatgggtagtgagtagtagagctgggacttgaacccagaagtctgacacagaagtctgcgcttttgattcctctacactatactatgtcccatttcaattacttatgaaaaataatctgataatgcagatggacagacagttcacaaaaaacaatactggcaaagcaacagatactgatggaaaaaggcaaatgacctagtccatcagcaacataaagacctaagtgctcactttgccatgcacagcccccagcttcctactaccatgatgctatggaaagggtatgggacttgggacatgagtcctgggttcaagtcccagctctgccacttttctgaaacccctcagttaagactcagtttccttgcctgtaaaatggagataacctctgtcctgcttgcctcacaggagttgtgataggatctggaaagactgaattattaggcaacagccaggatcatcattttagaatgaggatgagcagcagttgggtagttcttaccacttgaggccagtaggggcttggacacacagtgatagagcatcattctgcaaatgtttgtgttttgcagatgcaaatgaagacagtaagatgggctcaacagtcactgccgctgttatcgggatcatcgtgcccataggtgagtgtggcccccagtcactgaagagaaaagagagaccctgcttaggcctagggaagagcgctagcagggtagagaacttggcctgccctattgacttgttctgcccttgcagccttcctgcccacctcccagtcctgatttaatttggttttttagcctagcacacaaggctcttcaggacctggccccaggtgaccttccaggtacatcccccatctccccacccctcgattcacactctacactccagctatgtgaagtgcgactgtatgatccctaggaacagggctggtatctcttgctcaccattctccccagctcctggcaatgtctagcacatggtaggatatcaaggatttgttgaattaatgaatagagctgcttaccattcctttaataggtcatactgtcttgttttctttctgtttggttttcaacaagtatttattaagcagctactatgtgccaaactctgataaggggaggaaaggcagttaaagatgaataagacatggttctgtcctacaaaagtttatagtcttgttagagagacccacataacacagataagttcattacgacctggtaggtcctaaggttaagctgcatgcactgacttcagagacagtgctgaggaaacacttaacttgggctgggggagggggaagagggaagaggaggtttcctaacagaagtgatatttgagctgggtcagccaagtgagggaggatcaagaacagtccaagcagtgaagacagcatgagtaaagccaggagtaggaaatggcctggaagggtcagggtggggtgggtttagagctagaaggagatcagtatggccagagtataacactttgttaagacctcacagagaatcatgggggctgattcattctcttccaccctgatgaccacacggtatcctgtacacccctctcttagcagtctcatctcgtagcagtatctttgcattctgattgtccattcagagctttatctcccttacttggctatgagtacttcaaggacaggaactttgtccttttatcctgggaatcttcagtatgccgagttagtcagcaaatgttttaaaaacttctcccctgtgtaagacactgactgtgccaagtgccaaggatccagggaagaaaaaaataaagactttaagagctttcagtctttaatcaggcaaaaataaagtcctttaaggtagatgttaatacatgtcattatgtgctatgataggggcatgttggatatagatagagacagaggaacaatgtaatagtggcatgatactcttgtgaagggatggtagaaggaaaggtaattccagagtaaaagtggcgcttctggagaagacagcatttgaattggccttgaaaggcttcaccaggaaagatgatggtgaggtgattattccaggattattttgattggagtggagaaagataaatctacccctttcttgccatcctttgccctatagaaagaggcagatatatgctgttttgctgacataactcactctgaaatattcaatatttttaatttctgctaatctgaggagtgaaagatgagtattatttccctgacatttccctgtgaggtagagtatattttcgtaagcttatcagcccctttacttatattttatctgttatgaatcgcccactcacagtcttttcttatttttctattggctatctttttcttatttatagaaatatttatacatgacaaatattaaacctttaaaatatatgttacaaatattttcttccagtctgacatttggttttaaagtttgtttatggtatcttttgccatgcataaatatgaaacttttaagtatcagatttgtcaatcttttaagatttctgggttttgtgtcttgcttaagaaggccagcctcactctaacttattaaaatatctcctgatgtttttcttttctactttaaacttttttttagtattaggatattaatctatttggaatttaaattttagagtatcgtatgaggtagagatttaactgtttttttctctatatacctgtctagtttccccaaaaccatcattgaataatccatacttctctcctgacttgcacgtcatctttattataaactacctcccatacgtactttgatttgcgtctaagcagtttattttccttcactgatttatatattcctacatactattagcacaacttcatgatatgttatgctcacaacatcttctcagctatttttattcagtttctcttctaggtgaacttcagaataatcttatcaattctataaaaattttggtgaagtttttatcaagattgttttagatatatgagtttatgtgaggagaatatacctttttattatattaaagcttcccatccagaaatgtggcctatttatttcagtcttcttttacgtccctcagcagaattttatagattacacaggacttgcgtatttcttcttaggttttcctaggtattttatagcttttgatgggctattacgaatgtatttttattccattactttttctttttctttttctttttaagagacaagaagatcttgcactcttgcccaggctggagtgcagtggtgcgatcacagttcactgcatcctcgaactcctgggctcaagggattctcctgcctcagcatcccgagtagctgggactacaggcatgcaccaccacacctggctaattttttaaattaatttttttgtaaagaccagggctcaccatcttgcccgggctggtcttgaactccagggttcaagcaatcctcctgcctcagcctcccaaaatgttggtattacatatgtgagccactgtgcctggcctccgttaaattttctaattggttgttgctgattaaaaagacggctaatgatcttttatgttgattcttgattaactaaaattatttctgatagtttttcaccagcttctcttaagagtttctaaaaatacaaatagctgttaataacagtttggtttcctcctttctcatatgtatttatttatttacttttttttttttttttttgagacaaggtctcactctgttgcccaggctggagtgcagtggcatgattgtggctcactgcagccttgacctcccaggctcaagcaatcctcccacctcagccttctgagtagctgggactacaggtgcccgccaccatgcccaactactttgtattttttgtagagatgggttttcgccatgttggccaggctggtctcgaactcctggcctcaagtaatctgcctgcctcagcctcccacagtgttgggattacaggcgtgagccaccgcacctgggctcctttcccatatttatacccttaaatttttttctggccttactgcatagctagatctctaagacaataaatattagcaatgataactgccttgttcctgtctttaatgcttatcaattattgtaatcttactaaaacagaaaccccttccatagcatcctagataggtgatcattcagcctccactgggatgctcagagtgactgctaatcaccttacaaagctacttgctccatttttacccagctgtgttggagagagcttcctcctttaatcattaacatagtcatttattctaaatcagagcttgtgttgccctctgtgtctccttctagagatgttcttcttcaggtggagcctcacctttggaaataaacactctgcctggccccatcccactctccaccccccagttttgggagagaatcgttttcttagagaaatctagggaagcagcagcattagggcaaaggtgtggtaaaattcactcattcattcagcacatgttactaggcacctagtcagtgctaggaactgggcgtagagagtttaaaaacaaaaaaaagacacagtccctgccttgaaagagctatctagttgggagtacagatacataaagtaagatactgtgtgtgatctgggagcacacatgagagagcaactgactctgcccacagttggggaagacttcacatttgaacaggatcttgaaggatgaatagttagtaaaggaaagaagggatgagagatgggctttcaaacagcagtaaaagaacatgcagaaacagagcctgaggagcaaagggtagtaaaagtggagtggtgacaagccttgtacagatgtctgagcagtgggttggagcctgctggaggtccagtgtcctgtgtccttcctccagtggtgatagccctcctgtgcatgagtggatacctgatctggagaaactggaagcggaagaacaccaaaagcatgaattttgacaacccagtctacaggaaaacaacagaagaagaagacgaagatgagctccatatagggagaactgctcagattggccatgtctatcctgcagtaagtatttctcactgggagaattcctaccttccgaccatcttcccttccatcctttcttcccctcccatcctttcttccttcccatcctttcttccctcccttccttccttccgtccttccctccctcctttccttccgtccttccctccctccctgtcttttttctttccttctttccttcctttcctccctccttcccttcctccttctttccttcctcaaacatttatcaaaaacgcaccatgtatcaggcactgttctaggccctggggaacacagaaatgctggggtaggtggttaaggtaaaaaggtatcaggaccaccttgtacctagaggctcttcctggcagtaaaaaaagccaaatgtctctctttctgctcagtaaattttcagaacctttagcctggaagggtaactgtggccatttaattcaaatgtattcatttcaatactgtatgccagttatgtgccaagcaccacattagatatcaagtattcaaaagtcaataaggaacatgcttgctcccaagaagctggtagggagttagagatactaacatacagtggtataattgtgtgctgaatgccgtggtggaagctcaggagtcccctcttctagaaagctatctttggcttgctttgttctcccacagtactctgggcctctctacctcacagcccctgtcacactgtagtccacttgtcttttactcagtggtctcctcactaacccataagatccttgagggcagaactgtctgattaatctgttttcctgatgcctagcacggcatggctgactcccaacaaatatttgttgaacagatgccatggaaacatcaacaagggagctattaattctgtctggggaatcaggcaaggaatgcctcacagagaaggtgacagatggactatgtccttgaaagattaatagcagttttcccgggagagaaggagggaaatggcattccagatagaggcatgtgcaaaggcttgaaggtacaacacagcatggctttttgggggaatgaggaccacaaagtggcacagcaggtgtcactgttatacagcacagtcagggggctgagtgtgacctcagaggtcatccacagtgccatccccctgtcaggcaatcagcagctttgatcgcccactgtgggcagagccctgtcttggggagaccagagaaccggaagacccagcccctgccctcaaggagctttttgtcttgccgggggaaccaaggtcacagctgcaccaactcccgaagaaccctctttccgagctgcctgtcgtcaaatccaaggtagggcagtgccactctaagtctgaggggctggtgagtgagggcatgaaccaaggcaggcgcagccaatcctagaaggctttctggtttgggaaggctgcaaattgtaagctgggtgttggggcaaagaagaaaaatgggttagtcacagaccaatgaatggcatgtggaagaaagcaatcaagtttggggcagggcagacagaattgctgctgaggcaaactgttcatgaaggggagacatgggaaatgagatggagcaaatgaggagggttagcagatggccttgaggatccttaacctcggccagtccaaaaaaatagttgcttgaccagtttttgaagatcagagggagcacagtggaagaagcactgaacttggaataagaaaactcccagttccatccttccactgccctgtgatctcagtcacttctttctgctcactgttatttgtaaaatgagaataacaacccccattctacctgcctcctgagtttataaagtacaagtgagatagcacgtgtgagagcactttgtgacttacaaagcactctgcacatgtaaagtgacattatttccagagaaagaaatgactcagggggagttactcccgatgagtgttaaggaccaagtaataagcttctgccagttgcagagaaataaggaaatcaacatttagtgagcacctactgtgtgtcagacactgttcccagtgttttacatatattttctcatttaatcttcataataaccttatcaagctgatattattcgccccattttgcagatgaggaaactgagactcatagaaattgaataacttgcctaaggtcatagccaggaagtggcagaaccagaattcaaactccagtctgtatatacacaaaagcccatgctctttcctttatatcgtgaggtaaatagccttgaagctctggaaatcaatattctcaacaacctgtctctcctctgtccatttctcggataactgtaccatcactactggggcctatctttggcctagagatctgtcttagagagagtgggagggtagctagactagaataagatagtcttaaatatctacactggtggaggatggccattgcattcataaaaaaactacagataacccaaagatgacttgaaaggcagtagagttactttttatcatatgtagaatgtccagagatgggagatactagtctgattctattttatgttggttacgttgacctaggatattctgggccctatgtgttgttaggtactatgttaaacactctctgtgcattatctcatttgattcctcaacaaccctgtgaggtaggtcctgttactattcccatttgatagatgataaaactaagtctcagagaagtaaagtggctggcccaaattcacataactatgaggaaaagtactgaagctggggagggtctttccaaaggagggtatctgggaaatggaaaagaggcaaacaagattacatcaggactagctggggaaagttagatgtgtaccctggagaagaaaacactcagaatgaacggaagggaattcaaacaccatctataaatttcaagggttgtcctatgtagaactgtctctgagtctgagatggaatcagggaatgtcagaagatataaacaaacaaatttcacattaatataggaaagaatttaaatctgttgtccacaatggaatagactggttcaggggttagtgggctcaccttcccatggtcagccatttttggcagacaggagtctagcatctacctaatgactggaaagcaggggtgagggagagagggatggaatttaattaacctgcattgcctcccaactgtgtttaatctgttgggaaggtgcagtatattacctttctaaatgtgattagcatgctagagacaagtaaccccatagcctgaaatttaacatttgccaaagctaacccactgaaattgaccaaacctaaaatcctataagggaggattaagaaaatttagatctgtgcaactcttctttacaaagatacaaaacagaatgatgaaaaaatctacagctttggattcatacagacctgggatcaaattttagttcagccacttgctatgtgatccagaacaaaccctacttaagctcattgagttttgtttctcatctgtaaaataaataggataaatcctgtctcttaggatagtttgaacattatgtgagctaatacctgttaaagtaacgtaagtctgtgatttgtcaatactaaataaatagtaactcttatggatctaatgatgaattctttggtttgtctccccagcgagtggcattaagccttgaagatgatggactaccctgaggatgggatcacccccttcgtgcctcatggaattcagtcccatgcactacactctggatggtgtatgactggatgaatgggtttctatatatgggtctgtgtgagtgtatgtgtgtgtgtgattttttttttaaatttatgttgcggaaaggtaaccacaaagttatgatgaactgcaaacatccaaaggatgtgagagtttttctatgtataatgttttatacactttttaactggttgcactacccatgaggaattcgtggaatggctactgctgactaacatgatgcacataaccaaatgggggccaatggcacagtaccttactcatcatttaaaaactatatttacagaagatgtttggttgctgggggggcttttttaggttttggggcatttgttttttgtaaataagatgattatgctttgtggctatccatcaacataagtaaaaaaaaaaaaaaaacacttcaactccctcccccatttagattatttattaacatattttaaaaatcagatgagttctataaataatttagagaagtgagagtatttatttttggcatgtttggcccaccacacagactctgtgtgtgtatgtgtgtgtttatatgtgtatgtgtgtgacagaaaaatctgtagagaagaggcacatctatggctactgttcaaatacataaagataaatttattttcacacagtccacaaggggtatatcttgtagttttcagaaaagcctttggaaatctggatcagaaaatagataccatggtttgtgcaattatgtagtaaaaaaggcaaatcttttcacctctggctattcctgagaccccaggaagtcaggaaaagcctttcagctcacccatggctgctgtgactcctaccagggctttcttggctttggcgaaggtcagtgtacagacattccatggtaccagagtgctcagaaactcaagataggatatgcctcaccctcagctactccttgttttaaagttcagctctttgagtaacttcttcaatttctttcaggacacttgggttgaattcagtaagtttcctctgaagcaccctgaagggtgccatccttacagagctaagtggagacgtttccagatcagcccaagtttactatagagactggcccaggcactgaatgtctaggacatgctgtggatgaagataaagatggtggaataggttttatcacatctcttatttctcttttccccttactctctaccatttcctttatgtggggaaacattttaaggtaataaataggttacttaccatcatatgttcatatagatgaaactaatttttggcttaagtcagaacaactggccaaaattgaagtcatatttgaggggggaaatggcatacgcaatattatattatattggatatttatgttcacacaggaatttggtttactgctttgtaaataaaaggaaaaactccgggtatatgtatagatgttcttcattatagacatcttctttgcttttcttggccttgggggaggaagggagaagtgctcttttctacttgtggggtctcccattggaaacataatcctatagtcccagaaggattcagtccccagtggctttcccatccaaagagaaagagtttgagtttcttaactctgctgttctgccacttactcccactagacaaccagggacaaggtgcaacatggaagtgtttgacttaagtaggagcagaggagctgcatctaatctcatcatacctggaacttgacacacttaagcaaatgccttcccatccctacctgccagatgcccccaactcaatgaagttggatgtctcaccagcttgataccctttgaattttcagtcagacattc

SEQ ID NO: 86 - RNA, 4528 nt, Homo sapiens
  source 1..4528: mol_type = mRNA
gccggggcgggcggcagcggcggcggcggcggcggcgggggcagcggcaaccccggcgccgcggcaaggactcggagggctgagacgcggcggcggcggcgcggggagcgcggggcgcggcggccggagccccgggcccgccatgggcctccccgagccgggccctctccggcttctggcgctgctgctgctgctgctgctgctgctgctgctgcagctccagcatcttgcggcggcagcggctgatccgctgctcggcggccaagggccggccaaggattgcgaaaaggaccaattccagtgccggaacgagcgctgcatcccctctgtgtggagatgcgacgaggacgatgactgcttagaccacagcgacgaggacgactgccccaagaagacctgtgcagacagtgacttcacctgtgacaacggccactgcatccacgaacggtggaagtgtgacggcgaggaggagtgtcctgatggctccgatgagtccgaggccacttgcaccaagcaggtgtgtcctgcagagaagctgagctgtggacccaccagccacaagtgtgtacctgcctcgtggcgctgcgacggggagaaggactgcgagggtggagcggatgaggccggctgtgctaccttgtgcgccccgcacgagttccagtgcggcaaccgctcgtgcctggccgccgtgttcgtgtgcgacggcgacgacgactgtggtgacggcagcgatgagcgcggctgtgcagacccggcctgcgggccccgcgagttccgctgcggcggcgatggcggcggcgcctgcatcccggagcgctgggtctgcgaccgccagtttgactgcgaggaccgctcggacgaggcagccgagctctgcggccgtccgggccccggggccacgtccgcgcccgccgcctgcgccaccgcctcccagttcgcctgccgcagcggcgagtgcgtgcacctgggctggcgctgcgacggcgaccgcgactgcaaagacaaatcggacgaggccgactgcccactgggcacctgccgtggggacgagttccagtgtggggatgggacatgtgtccttgcaatcaagcactgcaaccaggagcaggactgtccagatgggagtgatgaagctggctgcctacaggggctgaacgagtgtctgcacaacaatggcggctgctcacacatctgcactgacctcaagattggctttgaatgcacgtgcccagcaggcttccagctcctggaccagaagacctgtggcgacattgatgagtgcaaggacccagatgcctgcagccagatctgtgtcaattacaagggctattttaagtgtgagtgctaccctggctacgagatggacctactgaccaagaactgcaaggctgctgctggcaagagcccatccctaatcttcaccaaccggcacgaggtgcggaggatcgacctggtgaagcggaactattcacgcctcatccccatgctcaagaatgtcgtggcactagatgtggaagttgccaccaatcgcatctactggtgtgacctctcctaccgtaagatctatagcgcctacatggacaaggccagtgacccgaaagagcaggaggtcctcattgacgagcagttgcactctccagagggcctggcagtggactgggtccacaagcacatctactggactgactcgggcaataagaccatctcagtggccacagttgatggtggccgccgacgcactctcttcagccgtaacctcagtgaaccccgggccatcgctgttgaccccctgcgagggttcatgtattggtctgactggggggaccaggccaagattgagaaatctgggctcaacggtgtggaccggcaaacactggtgtcagacaatattgaatggcccaacggaatcaccctggatctgctgagccagcgcttgtactgggtagactccaagctacaccaactgtccagcattgacttcagtggaggcaacagaaagacgctgatctcctccactgacttcctgagccacccttttgggatagctgtgtttgaggacaaggtgttctggacagacctggagaacgaggccattttcagtgcaaatcggctcaatggcctggaaatctccatcctggctgagaacctcaacaacccacatgacattgtcatcttccatgagctgaagcagccaagagctccagatgcctgtgagctgagtgtccagcctaatggaggctgtgaatacctgtgccttcctgctcctcagatctccagccactctcccaagtacacatgtgcctgtcctgacacaatgtggctgggtccagacatgaagaggtgctaccgagcacctcaatctacctcaactacgacgttagcttctaccatgacgaggacagtacctgccaccacaagagcccccgggaccaccgtccacagatccacctaccagaaccacagcacagagacaccaagcctgacagctgcagtcccaagctcagttagtgtccccagggctcccagcatcagcccgtctaccctaagccctgcaaccagcaaccactcccagcactatgcaaatgaagacagtaagatgggctcaacagtcactgccgctgttatcgggatcatcgtgcccatagtggtgatagccctcctgtgcatgagtggatacctgatctggagaaactggaagcggaagaacaccaaaagcatgaattttgacaacccagtctacaggaaaacaacagaagaagaagacgaagatgagctccatatagggagaactgctcagattggccatgtctatcctgcagcaatcagcagctttgatcgcccactgtgggcagagccctgtcttggggagaccagagaaccggaagacccagcccctgccctcaaggagctttttgtcttgccgggggaaccaaggtcacagctgcaccaactcccgaagaaccctctttccgagctgcctgtcgtcaaatccaagcgagtggcattaagccttgaagatgatggactaccctgaggatgggatcacccccttcgtgcctcatggaattcagtcccatgcactacactctggatggtgtatgactggatgaatgggtttctatatatgggtctgtgtgagtgtatgtgtgtgtgtgattttttttttaaatttatgttgcggaaaggtaaccacaaagttatgatgaactgcaaacatccaaaggatgtgagagtttttctatgtataatgttttatacactttttaactggttgcactacccatgaggaattcgtggaatggctactgctgactaacatgatgcacataaccaaatgggggccaatggcacagtaccttactcatcatttaaaaactatatttacagaagatgtttggttgctgggggggcttttttaggttttggggcatttgttttttgtaaataagatgattatgctttgtggctatccatcaacataagtaaaaaaaaaaaaaaaacacttcaactccctcccccatttagattatttattaacatattttaaaaatcagatgagttctataaataatttagagaagtgagagtatttatttttggcatgtttggcccaccacacagactctgtgtgtgtatgtgtgtgtttatatgtgtatgtgtgtgacagaaaaatctgtagagaagaggcacatctatggctactgttcaaatacataaagataaatttattttcacacagtccacaaggggtatatcttgtagttttcagaaaagcctttggaaatctggatcagaaaatagataccatggtttgtgcaattatgtagtaaaaaaggcaaatcttttcacctctggctattcctgagaccccaggaagtcaggaaaagcctttcagctcacccatggctgctgtgactcctaccagggctttcttggctttggcgaaggtcagtgtacagacattccatggtaccagagtgctcagaaactcaagataggatatgcctcaccctcagctactccttgttttaaagttcagctctttgagtaacttcttcaatttctttcaggacacttgggttgaattcagtaagtttcctctgaagcaccctgaagggtgccatccttacagagctaagtggagacgtttccagatcagcccaagtttactatagagactggcccaggcactgaatgtctaggacatgctgtggatgaagataaagatggtggaataggttttatcacatctcttatttctcttttccccttactctctaccatttcctttatgtggggaaacattttaaggtaataaataggttacttaccatcatatgttcatatagatgaaactaatttttggcttaagtcagaacaactggccaaaattgaagtcatatttgaggggggaaatggcatacgcaatattatattatattggatatttatgttcacacaggaatttggtttactgctttgtaaataaaaggaaaaactccgggtaaaaaaaaaaaaaaaaaaaaaa

SEQ ID NO: 87 - DNA, 17021 bp, Homo sapiens
  source 1..17021: mol_type = genomic DNA
agcactttgggaagccaaggcaggtggattgcttgagctcaggagtttgaggccaccctgggcaacgtggcaaaatccagtctctacaaaaaacacaaaaattagctgggcacagtggtgcgcacctgctgtcccagctactcgggaggctgaggtgggaggatcacctgagcctgggaggtcaaggttgcagcaaaccaagatcctgccactgcactccagcctgggcaacagagcaaaaccctgtcaaaaaaaaaaaaaaaatctggtctaagcaccacctttgatggaggcaggaatcctgcagcagcctggagccaacccaatggctccctgcctctggtgctctatttcttatcaccatacaggtctctaaggtcacctttaggtctaacattgtatgaatgattgtcagcaactttccaatttttttcatatacatatattttttttattttattttttactttttctttttttgagacaggatctcactctgtcacccaggctggagtgcagtggcgtgatcatagctcactgtagcttcaacctcctgggcacaagtgatcctcccacctcagcttccaaggtacctgtgactacaggaatgcgccaccatgcccggctaattttgttatatatatatatatatatatttgtaccttggttttctcatctgtaacaccaggggttgaagtgctgtgatattttttggttctaggataatttggaaatagggatctcttaacatcttggatactgccaatagatcattcacgaaatccctttagatgagtgttatgtttacttaggtctctaaaacaatttgtaaggtcaacagatggggataagaatgacctgaagctggtcgtctttgttcgcaaccagaaacagtcctgcctcaaaaaaaaaaaaaaaaaaaagggagtaggcaggtggccatatttgtttctggcaagtgagtgctgaaggaaaggagctgaagcctcccacagtcataactggtgctggcaggctactgtctcggtcttgggcgccactgatctaaggtcacggctctgcttgctgctcccacccgctccagtttaaaacctgcggttccagggttctccagcccctccctttttcacgctccgaagccgagaaggcccaaagcgaagacagagaggacccggaagtagggaaaacctctgagcacgtgatgggggaacacgcgggtgctgtcacgtgatccgacaaacggcctctgcatagtgcagaacattctgctgctcttaaaggtacaggcctcagggtccctgctgtagacggggcgggggagagtacgatgggtggggcgtggtgggtcgtagggcgctcgagatggagcccccagcttccttgatggatcgcggggcgcgagtgccctagacaagccggagctgggaccggcaatcgggcgttgatccttgtcacctgtcgcagaccctcatccctcccgtgggagccccctttggacactctatgaccctggaccctcgggggacctgaacttgatgcgatgggaggctgtgcaggctcgcggcggcgcttttcggattccgagggtgagtattcccgcccaccctcatggaacgaccacctctggctcgcagcccacctgaggggaatgagagctgactcggccccgggaggacacgcaaggagcggtcgtgcacctgagagtaggtgggggtcatgccctcttctcgctctcccaggggaggagaccgtcccggagccccggctccctctgttggaccatcagggcgcgcattggaagaacgcggtgggcttctggtgagtggcctgagacttcagcgagtgacaatggcatgagaagagggaagtgaccggaggaaagggggaagaaagagttaagctgcgcaaaggagctgaacccacaaatatttactgaatccactggtttgccccaggggcagcatgtaaaatttccaaacttcactccttatcaccttccggatttagcaagatcctcatacctaccacctgtaggattatttacttttttcttccagccaattcagccttaacgttttttagtgcacatatttttaaaaagaaaactttaaatcacgactccacttggaaaaccagcgttttcctagtgaacgtttaaataaatgcatcactactaaaacttttttatttttttaatttattttattttatcttatttttttttctttttgagacagggtcttgctctgtttcccaggttggaatgcagtagtgcaatcacagctccctgcagcctggaactcctgggctcaagtgattctcccacctcagcctccaagtaggtgtggctacaggtgtgcaccaccgcatctgcctaatttttatatttttttatagagatgggggtctcactatgggacctgggctggtctcaaactcgtggcctcaagtgatcctcctacctcaaccttccaaagtgctgagattacaagcatgagccaccatgccgggcctgaacctttttttttttttttttttttgagacggagtctctctctgtcctccaggctggagtgcagtggcgcaatctcggctcactgcaaactccgcctcccaggttcacaccattcttttgcctcagcctccggagtagctgagactacaggcgcctgccaccacgcccggctatttttttgtatttttagtagagatggggtttcaccgcgttatccaggatggtctcgatctcctgacctcgtgatccgcccgcctcggcctcccaaagtgctgggattacaggtgtgagccaccgcgcccagctttttttttttttttttttaattttattttatttttgagacagagtctcactctatcacccaggctggagagcagtggcacaatctcggctcactgaaacctccacctccaaggttcaagctattctcctgtctcagctccccgagtagctgggattacaggtgcgtgccaccagacacagctaattttttgtatttttagtaaagacaggatttcaccatgttggtcaggctggtctagaactcctgaccttaggtgatccgcttgcctccacttcccaaagtgctgggattacaggcgtgagccaccgtgccccgccctgacataggggctttgggatcacagacttggattcacttccagcctccaaggcctctcccagaaactctctgtgaccactctccttttttttttttttttttgagatagagtctcgctcttgtagcccaggctggagtgcaatggcacaatctcggcttactgcaacctccgcctttcgggttcaagtggttctcctgcctcagcctcctgagtagctaggattacaggcatgtgcaacttcgcccagctaattttgtattttttagtagagacggggtttctccatattgctcaggctggtctcgaactcctgacctcaggcgatccgcccgcctcggcccctcaaagtgctggaattacaggtgtgagccactgcactcggcctcttcctttttattttttatttttgtgacagggtcttgctctgtcacccaggctagagtgcagtggcatgatcacagttcactgcagcctctgactcctggactcaagcaatcctcccacctcagcctcccaagtagctgggactacagtgcaagccaccacacctggctaatttttaaattttttgtagagatgggggtctcactatcttgcccaagcaccaaagcctgtatttttgaccccaacattgaatgaggatgggatctggtgatagagggaaaaaaaagagggggctgattgaagggcacaggtaagggaaggtttggcacaaaggctacagatggctgcaggatgaggagggagttgagacctgtcctgctccttccaggctgctgggcctttgcaacaacttctcttatgtggtgatgctgagtgccgcccacgacatccttagccacaagaggacatcgggaaaccagagccatgtaagtgactctctaccaccaccaccatggttagtccctgtgggaagatgagggggtgggacaaggtggggtaaagtttccagtctctggctgggcacagtggctcacacctgtaatcccagcagtttgggaggctgaggcgggcggatcacttgaagtcaggagttcgagaccagcctggccaacatggtgaaactccgactctactaaaaatacaaaaactacctgggtgtggtggcacacacctgtagtctgagctattcaggaggctgaggcaggagaattgcttgaagccaggaggtggaagttgcaatgagccaagatcacaccactgcactctagcttgggcaacagagtgagacaccatctcaaaaaaaagaaagctcttgaatgtgttatctaaacaaagtccatttacagggccatctgtggcctgtggtctagtagtgtgagactcatatggaaaccccctcttcattgtgcatgcagagacgctgaggtcctgagaagtcagtcactgctgacccaaagccatccttcaagtgaaggcagagctgggacgggagccaggctctgtgtgtctatccctctgcctccagggtgaaagacatgcttttctcccattaggtggacccaggcccaacgccgatcccccacaacagctcatcacgatttgactgcaactctgtctctacggctgtgcgtactcatctcacctggtccttgcctgacccagggcccctgggtctatagaccccactcccagcccttcactacccagctgggactgtcatgattaaaacagttgagacctgggctgggcgcactggctcacacttgtaatcccagcactttgggagaccaaggtgggaggatcacttgagcctaggagtttgagaccagcctgggcagtatagtgagacccccatcttaaagaaaaaaattaaaaaatatatatatataaaataattgagaccttaatataatttctgaggctgaggcggatggatcacttgagaccaggagttcaagaccagcctggccaacatggtgaaaccccatctgtactaaaaatacaaaaattagccaggcatggtggtgcacgcctgtaatcccagctactcaggaggctgaggcaggagaatcacttgaacccaggaggtggaggttgtagtgagccaagatcgagccactacactccagcctgggtggcagaatgagactcactctcaaaatatatatatatatagtttctgagtcctttctgtctgcaccatatattagctcatttaagccacacagcagtcctgtgagctaggtgctatgatattcccattttccagatgaggaaactgaagctcagagagtataaactcttgacacacaactaaggagtgggagagctgagacttgaacccaggcgtgcctgactccagagcctgtgtttgtagcaggcctgtttggccagctcctgcctctccttggccacgtggttgggagggttgtcccctggaagctctgcggtctcactctattctcctgtcccaggctgtgctcctggcggacatcctccccacactcgtcatcaaattgttggctcctcttggccttcacctgctgccctacaggtctgggtgagggtagtgggaggcagggtgggcaggagctgagaaaggggaggctgggatggctgagatgctgagagtagagaccgaccttccccctcccttcccttctcaccccctcagcccccgggttctcgtcagtgggatttgtgctgctggaagcttcgtcctggttgccttttctcattctgtggggaccagcctgtgtggtgagtgtgtggttctgtgtcagatggggagccccgaggaaccacatcagagcatttgtgggaagagtctccccagcctcccagaggaaagggattcattctgtcacccttagaagcctgctagggctatcagcagtaggcgatgggagactgggacaatttggaggggtaggcagtggaggagatgggagaaaatggatgaattagatggagattgaggtgaacaaagtcaagactctgtgatggaccaggcacagtgactcatgcctataatcccagcactttggaaagccaaggcaggcagatcacctgaggtcaggagttcgaaaccagcctggccaacatggagaaaccccgtctctaccaaaaatacaaaaattagctgggtgtggtggcaggagcctgtaatcccagctactcgggaggctgaggcaggagaatctcttgaacctgggaggcagaggttgcagtgagccgagatcacgccactgtactccagcctgggtgacagggcgagactccgtctccaaaaagaaaagaaaagaaaaagactgatgaaggggcagagacatcaagggtgcatgtctgcccctggtctgataactgggtggatggaggtgccactctccatgaagggacacgcaggggagtggggctctgcttcagacctggaacctggcctatgcatgggatctattggagcctctatgagctgatactgaggaggccatggccagacacattagaggcctgggcagtgtggcaaggtgtggtgtgaccatcccagtgcttgtcctccccccaggtgtggtcttcgctagcatctcatcaggccttggggaggtcaccttcctctccctcactgccttctaccccaggtaagcaggtggagcagggagtgtggggagaggctgtcccatggtcagcctaggtcctcctgaatgttcctgtgttctccttcccagggccgtgatctcctggtggtcctcagggactgggggagctgggctgctgggggccctgtcctacctgggcctcacccaggccggcctctcccctcagcagaccctgctgtccatgctgggtatccctgccctgctgctggccaggtgagctgccctgagccgggagggagaggggtccaaggagagaaaacttggccatggctgggtgtggtggctcacgcctgtaatcccagcactttgggaggccaaggagggcagatcgcctaaggtcaggaaaccagcctggccaacatggtgaaaccccgtctctactaaaaatacaacaattagccaggtgtggtggcgggtgcctgtagtcccaactactcaggaggctaaggcaggagaatcgcttgaaccccggaggcagtggtggcagtgagccgagatcgtgccattgcactccagcccgggcgacagagttagactctgtctcaggaagaaaaaaaaaaaaagaaagaaaagaaaacttgattatgattgcaatcttcaagtccctaccttgctgtgaagggaggcggaatctggactctgatagccccaggtgtgagtcctggagctgccactttttagctttgtagcgttgaacaagttactccacctctctgaaccctcagtttccccatatctcaaatggcagttgttcttgctttccttggaggtgatgagggtaatgcattcagcacagtgtggttcccaaggtgattagaagtaggatgagggtggactttatttgattagttccttttttttttttttttttttttaatcagtgttgaccaggttggcctcgaatgtgtagccttgcctgcctgagtgccagggcaacaggcctgaaccatggcgactcccttttttttttttttttttttttttttttgagacggagtctcatggtgtcactcaggctggagtgcagtgactggtgtgatctcagctcactgcagcctcggcctcccgggctctagtgattctcctgcctcagcctcccgagtagctgggactacaggcccatgccaccatgcctggctaattttttatatttttagtagagacggggtttcactgtattggccaggctggtctcaaactcctgacctcaagtgatccacctgccttggcctcccataatgctaggaatacaggcgtgagccaccgcgcccggcctgattagttctgtgtattttcatgcatattacaaaacactttggccgggcatggtggctcacatctgtaatcccagcactttgggaggccgaggcgggcgcaccacgaggtcaggagtttgagaccagcctggccaatatggtgaaaccccgtctctactaaaaatacaaaaattagccaggcttggtggcgcttgcctgtagtcccagctacttgggaggctgaggagaagaatcgcttgaacccaggaggcagaggttgcagtgagccgtgattgtgccactgcactccaggctgggcaacagagcgagactccgtctaaaaaaaaaaaaaacacacactttgaactagccagacacacctggcccttcacaagattagtgcttaggacaagtctaagtagaaaaagtgagtccatttaaagaaaaatattaagtaaaaatatatatatacaggaggaatatggatatggcaaataacatgaagccagaacctaagtgactaaaatcgaggaagttctggcctagcacagagtgaacgtataattaatgggagctagagcgaccattagaataataatggccagaaaacagaactgactcgctaggtatgagccagcagtccgaacaagggcctgctgagcacagtggctcacagctgtaatcccagtgctttaggaggctgaggctggaggaccactagaggctagaaatttgagaccagcctgggcaacatagcgagactccatttatacaaaaaatggaaaatatgaggcgggcttggtggcacgtgcctgtagtccccgctacttgggaggctgaggcgggaggattgcttgagcctgggaggtcgcggctgcagtgagctatgattgcaccactgcattccagcctggatgctggagaaagaccctgtctctgaaaaaaatcaaaacaaaatgaaggcccatgaataggaataaggagataaattcaggtccaaagaaagaagcctttgtccacaattggagctctcccgcacagcgtaggagccttagaggcagtgagctacccatctttgaaagtgttcaaaggtagaggtgttccctgggaaaagtggcctagatggtccctggggaccttcccagccagtagggttttctgaccctgccttcatcctactcctagctatttcttgttgctcacatctcctgaggcccaggaccctggaggggaagaagaagcagagagcgcagcccggcagcccctcataagaaccgaggccccggagtcgaagccaggtaggagacacagaccctcagagaggtcactttctttctctctgggtttggccttttcctctctgcaataggcaaagttaagaggggaaagagagtgagtgtactggttatgggaaaagcctttgtctatttgagaaatacttgttgaggacgagcacagtggctcacgcctgtaatatcccagcactttgggaggctgaggcaggaggaccacttgagctcagaagtctgagtccagcctgggcaacagagcaagaccttgtcgcaaaaaaaaaaaaaaaaaaaaaaaaaagaaaagaaaggaaggaagggagggagagaagaagggatattaattgagtacttaccatgtgccaggcattccaatcacaagtgctgaggccctgcggtggggataagctgggatgttctagaaccagagaatggccagtgagactgggcagggtgggccaatggccatctgtggagctgtacaagagacattggccgggcgtggtggttcatacctgtaatcccagcactttgggaggctgaggcagatggatcatttgagatcaagagtttgagaccagtctggccaacatggtaaaaccccgtctctactaaaaataaaaaaattagccaggtgtggtggtgcatgcctgtagtcccagctacttgggaagctgaggcacgagaatcacttgaacccaggaggcagaggctgcagtgagctgagattgcaccactgcactgcagcctgggcaactgagtgagactctgtctcaaaaaataaaaaaaattaaaaatcaaagagacgtgaagaggtctcacctggttagcttttattttcatcatgataaagtatgtatattacttgaagtttaccattttattattttttatcttactttatttttttgaggtggagtttcgctcttgttgcccaggctggagtgcaatggcgcaatctcagctcactacaacctctgcctcctgggttcaagtgattctcctgcctcagccacccgagtagctgggactacagacacctgccaccacacatggctaatttttgtatttttagtagagatggggtttctccatgttggccagggtggtcttgaactcctgacctcaggtgatccgcccacctcagtctcccaaggtgctgggattacaagcatgagccactgcgcccagccattttaaccatttttaagtgtccaatccagtggcatggaagtgagttcccactgttgcgtggtctggttaattctgtcataccggtgcctctttgccgagtcttcagtgtgaaaacttcatctgcccttctctctctgttcccctgcaggctccagctccagcctctcccttcgggaaaggtggacagtgttcaaggttcggatgatggctggggtatgtccctgtggggcttgctcacctccaggccccccgcttatatcttctgccttttccagggtctgctgtggtacattgttcccttggtcgtagtttactttgccgagtatttcattaaccagggacttgtaagtgaggggtgctaggaggggtgtggaggtggcgattggggctgggacccacacagccccgtccatctcccctgtctggtatttgttgcagtttgaactcctctttttctggaacacttccctgagtcacgctcagcaataccgctggtaagaggagcgagggcagtgggctgggagggcgccgtggtgatgcagctgccctgcccagtaggcaccggggggagcgggatggtccctggaggagcctcctctcctccccccaaccctaacctcaggtaccagatgctgtaccaggctggcgtctttgcctcccgctcttctctccgctgctgtcgcatccgtttcacctgggccctggccctgctgcaggtaccaaacccctgcccctcacttcactcccaccttggctcccagcttggctcccagcttccccaaaccccctgcttcccactatcagtgggaagtgtaaatttttttttttttttttgagacagagtctcgctctgtcgtccaggctggagtgcagtagcgcaatcttggcttactgcaacctctgcctcccgggttcaagtgactctcctgcctcagtctcctgagtagctgggattacaggcgcccgccaccatacctggctaatttttgtatttttagtagagatgggattttgccatattggctggtcttgaactcttgacctcaggtgatctgccggcctcagcctcccaaagtgctgggattacagggaagtgtaaattgtacactatcatttcttagcacagggaaccaaagtccagcagagctccatgtaaaatgtatagcctcaggagccaagcaaaactgagcttcagtactcagccactgtgtgacttagggcaggtctcagaacctctctgagcctcaatttcctcatgtataaattgggtgtggccaatacctatttttcagggtagttgtaagaaatagagatgagagaaagaatcgaagaacaagattttgtagtgtgtgtgtgtgtgtgtgtgcgtgtgtgtgtgtgtgtgtgtgtgtgtgtgtgtgtgttttaagcattgggattgggccgggccaggtggctcatgcctgtaatcccagcactatgggaggctgaggcaggtggatcatttgagcttggtagttcaagtccagcctgggcaacatggcacaatcacatctctacaaaaattagccaggtgcagtggcgcacacctgtagtcttagctactgggaagctgaggtgggaggatcacttgaacccatgaggtcaaggctgcagtaaccaaggtcatgccactgcactccagcctaggcaatagagcgagaccctgtctcccagaaaaagaaaaaagaaaggaaaagtcggaaccttcctctgtcgcctaggctggagtacagtggcatgatcataggtcatttacctcaggcaaagagacaggctttcaaataatgtttctaactataagaaaatgtacagttcttttattctagatagttaattataatagaattggtgactttgaagtcagtgggttatttatcttgagggtggtgagcaaattcaactgcccttggcaaacagtagtttacagctttaagggcgcaaacacccttccttacaacagtctaataaaaggagtttcatataaccagcattcattgtttcaaggttacaaatccacagcccctgcaggtaactgttacaataaactgtcaactgtgacaggaaagtcttctgcctttgaaatttaggaacttggccagtcctggtggctcacacctgtaatcccagcactttgggaggccaaggcaggtgaatcacctgaggtcaggatcaggagtttgagaccagtctggccaacacagtgaaaccccgtctctattaaaaatgcaaaaattagttgggcgtggtggcacctgcctgtcatctcagctactcgctaggctgaggcaggagaattgcttgaactccggatatggaggttgcagtgagccgagattgcagtactgtactccagcctgggccacagagcgagactccatctccaaaaaaaaagacttaggaactcaattctgtgatagcaaaatacagaaatagagattatactttaggctaggtgttgtggctcacacctgtaatcccaatgcttttggaggctagggtgggaggatcactcgaagccaggagcttgagaccagactggacaacatagtgagaccccccacctctacaaaaaattaaaaaaaaaaataagccaggtgggagaattgcttgagcccagaagtttgagagagcagcctgggtaacatcacgagacctcatctctacaaaaaacaacaacagggtgtggtgacattcacctgtaatcccagctactcgggaggctgaggcaggaggatcgctttagcccaggagttccaggctgcagtgagccataatcatgccactgtaccccagcctgggtgagaccctatctcaaaaaaaaagattacactttcatattatggcaaaagcatgtaaatatcctccagcctccttccttatttatctgagcagtgctgcaagcccagggtttgtacccacaaaaccccaaatttataactcagggtgcttgtagataccactgaaacatgtagcttatggttttaagctacatgtttttagctataatgttttttgttttgttttgttttttgagatggagtctcgctctgttgcccaggctggaatgtagcggtgcaatcttggctcactgcaacccctgcctcccagattcaagcgattctcaagcctcagccttccgagtagctgggattacaggtgcgccaccacgcccagcaaattttttgttttgttttgttttgttttgttttttagagacagagttttgctcttgtagctcaggctagagtacaatggcgtgatcttggctcactgcaacctccgcctcccaggttcaggcgattcttctgcctcagcctcctgcgtagctgggattacaggcacgtgccaccacacctggctaatttttgtattttttagtagagatggggtttcgccatgttggccaggctggtcttgaactcctgacctcaggtgatccacccgccttggccttccaaagtgctgggattacaggtgtgagccaccacacctggctagaggtgtgtcctttttaatgctcatctttaagtctacctcagatttaatgaattaggacctctagggtaagccccgcttggggcatttgtacctagatccccaggcaattcttacatatacgaaaagtatgaaccgccacgaggaggcctacacactgcacaagaggcaatgtggcgtggtcagtgctgggaggatggcacctccttgagagactggggcacagaggtgggacctacaccctggggtggggatcgaagaggcttcctggccaggtgcggtggctcctgcctataatcccagcactttgggaggctgaggcaggggggcagcgactgcttgagaccaggagttcgagcccagctgaataggatgcccggctactcccaccttgttttaccatagtgaaccaacggtttttccaataggggcaattttgctgcccagcggatgtttggcaacgtctgcaggcatgctttggttgtcacaactgagggatgctatgggcatctagcgggcagaggccagggatcctgctaaatgcgctgccatatacaggacagccctcaccatgcagaacaaccagcaccaaacgccaagagtgctgcaattgagaaatcctggtttcgatggtcccacttcctttaagaagcctccatttttttttttttttttttttttttttttatgagacaggatcttgctctgtcacccaggctggagtgcagtggcacaatcatagcttactgcagcctccacctcctaggttcaagcaatcctcctgtctcagactcccgagtagctgggactgcaggtgcgtgccaccatgctcaactaatttttaaattttttgtagagacggagttttgttatgttgcccaggctggtctcgaactcctggcctcaagtgatcatcccaccttggtctcccaatgtgctggtattacctgcatgagccactgcaccaggctgaggttgagaattttttttttttttttttgggatggagtctctctctgttgcccaggctggagtgcagtgctgcgatcttggctcactgcagcctctgcctcccaggttcaagtgattctcctgcctcagccttccaagtagctgggactacagaaccactacacccagataatttttgtatttttagttgagatggggttttaccatgtttagtagagaccaggccaggctggtctcgaaatcctgacctcaggtgatctgcccacctcagcctcccaaagtgctgggattacaggtgtgagccaccacaccgggctggtgttgagattttatctagacctggcagccctctccttcaccagtaactcctaaaaccagggacccctggaggggaggccacctctccttccctgccccgccctggtcccaggcttagcctctccccctgttcacagtgcctcaacctggtgttcctgctggcagacgtgtggttcggctttctgccaagcatctacctcgtcttcctgatcattctgtatgaggggctcctgggaggcgcagcctacgtgaacaccttccacaacatcgccctggaggtcagcattggccgggcaagggctgggggtggcctgtccagggacacccagggcagggatgtctgggactgaagcctcacccctgctctctgccctcccagaccagtgatgagcaccgggagtttgcaatggcggccacctgcatctctgacacactggggatctccctgtcggggctcctggctttgcctctgcatgacttcctctgccagctctcctgatactcgggatcctcaggacgcaggtcacattcacctgtgggcagagggacaggtcagacacccaggcccaccccagagaccctccatgaactgtgctcccagccttcccggcaggtctgggagtagggaagggctgaagccttgtttcccttgcaggggggccagccattgtctcccacttggggagtttcttcctggcatcatgccttctgaataaatgccgattttatccatggacttcttatatcgtttttgtctctaaaaagaaacttttattatgaaagtaatacatgcccactttcctatatatagacagcataaagaaggtatgtcagcagatttctcccttttttgtttgtttgtttgtttgtttgtttgttttgacagagtctcactctgtcacctaggctggagtgcaatggcgtgatcttggctcactgcaacctccacttcccggttcaagcaattctcctgcctcagcctcccgagtagctgggattacaggtggtcactaccatgtctggctaatttttatatttttagtacagacgacattttgccatgttggccaggctggtctcaaactcatgacctcaggtgatccgcccaccttggcctcccaaagtgctgagattacaggtgtgagccactgtacctggcctctgccatctttgaggccttacgtattcattcattcatgcattcattgtttgggacaatctgtaaacaatcatgttggacattctttccagcatgaaagttttcagagaagtggaaagaattgtgcagtgaatcatcctgagtatgcgccaccctgttctatgttaacattttgttacagttgttttatcatgtagtccagcccccatcaaatctatgtattcactgttccatcagtgagtagatagagctaatgaatggcagggttggcacctgaggcattttattttattatttttttttatttttagagacagggttgcactctgtcacccaggctgaagtacagtggcacagtcatggctcactgtagccttgacctcctagactcaaacaatcctcacaccttggcctcccaagcagctgggactgcaagtgcatgccaccaagcccagctaatttttttttttttttttgtagagacgcgatcttcctatgttacccaggctggtcttgaactcttgagctcaagcagtcctgccttggcctcccaaagtactgagattacaagcatgag

SEQ ID NO: 88 - skipped

SEQ ID NO: 89 - RNA, 1915 nt, Homo sapiens
  source 1..1915: mol_type = mRNA
ataactggtgctggcaggctactgtctcggtcttgggcgccactgatctaaggtcacggctctgcttgctgctcccacccgctccagtttaaaacctgcggttccagggttctccagcccctccctttttcacgctccgaagccgagaaggcccaaagcgaagacagagaggacccggaagtagggaaaacctctgagcacgtgatgggggaacacgcgggtgctgtcacgtgatccgacaaacggcctctgcatagtgcagaacattctgctgctcttaaagaccctcatccctcccgtgggagccccctttggacactctatgaccctggaccctcgggggacctgaacttgatgcgatgggaggctgtgcaggctcgcggcggcgcttttcggattccgagggggaggagaccgtcccggagccccggctccctctgttggaccatcagggcgcgcattggaagaacgcggtgggcttctggctgctgggcctttgcaacaacttctcttatgtggtgatgctgagtgccgcccacgacatccttagccacaagaggacatcgggaaaccagagccatgtggacccaggcccaacgccgatcccccacaacagctcatcacgatttgactgcaactctgtctctacggctgctgtgctcctggcggacatcctccccacactcgtcatcaaattgttggctcctcttggccttcacctgctgccctacagcccccgggttctcgtcagtgggatttgtgctgctggaagcttcgtcctggttgccttttctcattctgtggggaccagcctgtgtggtgtggtcttcgctagcatctcatcaggccttggggaggtcaccttcctctccctcactgccttctaccccagggccgtgatctcctggtggtcctcagggactgggggagctgggctgctgggggccctgtcctacctgggcctcacccaggccggcctctcccctcagcagaccctgctgtccatgctgggtatccctgccctgctgctggccagctatttcttgttgctcacatctcctgaggcccaggaccctggaggggaagaagaagcagagagcgcagcccggcagcccctcataagaaccgaggccccggagtcgaagccaggctccagctccagcctctcccttcgggaaaggtggacagtgttcaagggtctgctgtggtacattgttcccttggtcgtagtttactttgccgagtatttcattaaccagggactttttgaactcctctttttctggaacacttccctgagtcacgctcagcaataccgctggtaccagatgctgtaccaggctggcgtctttgcctcccgctcttctctccgctgctgtcgcatccgtttcacctgggccctggccctgctgcagtgcctcaacctggtgttcctgctggcagacgtgtggttcggctttctgccaagcatctacctcgtcttcctgatcattctgtatgaggggctcctgggaggcgcagcctacgtgaacaccttccacaacatcgccctggagaccagtgatgagcaccgggagtttgcaatggcggccacctgcatctctgacacactggggatctccctgtcggggctcctggctttgcctctgcatgacttcctctgccagctctcctgatactcgggatcctcaggacgcaggtcacattcacctgtgggcagagggacaggtcagacacccaggcccaccccagagaccctccatgaactgtgctcccagccttcccggcaggtctgggagtagggaagggctgaagccttgtttcccttgcaggggggccagccattgtctcccacttggggagtttcttcctggcatcatgccttctgaataaatgccgattttatccatggaaa

SEQ ID NO: 90 - RNA, 1879 nt, Homo sapiens
  source 1..1879: mol_type = mRNA
gtgctgtcacgtgatccgacaaacggcctctgcatagtgcagaacattctgctgctcttaaaggtacaggcctcagggtccctgctgtagacggggcgggggagagtacgatgggtggggcgtggtgggtcgtagggcgctcgagatggagcccccagcttccttgatggatcgcggggcgcgagtgccctagacaagccggagctgggaccggcaatcgggcgttgatccttgtcacctgtcgcagaccctcatccctcccgtgggagccccctttggacactctatgaccctggaccctcgggggacctgaacttgatgcgatgggaggctgtgcaggctcgcggcggcgcttttcggattccgagggggaggagaccgtcccggagccccggctccctctgttggaccatcagggcgcgcattggaagaacgcggtgggcttctggctgctgggcctttgcaacaacttctcttatgtggtgatgctgagtgccgcccacgacatccttagccacaagaggacatcgggaaaccagagccatgtggacccaggcccaacgccgatcccccacaacagctcatcacgatttgactgcaactctgtctctacggctgctgtgctcctggcggacatcctccccacactcgtcatcaaattgttggctcctcttggccttcacctgctgccctacagcccccgggttctcgtcagtgggatttgtgctgctggaagcttcgtcctggttgccttttctcattctgtggggaccagcctgtgtggtgtggtcttcgctagcatctcatcaggccttggggaggtcaccttcctctccctcactgccttctaccccagggccgtgatctcctggtggtcctcagggactgggggagctgggctgctgggggccctgtcctacctgggcctcacccaggccggcctctcccctcagcagaccctgctgtccatgctgggtatccctgccctgctgctggccagctatttcttgttgctcacatctcctgaggcccaggaccctggaggggaagaagaagcagagagcgcagcccggcagcccctcataagaaccgaggccccggagtcgaagccaggctccagctccagcctctcccttcgggaaaggtggacagtgttcaagggtctgctgtggtacattgttcccttggtcgtagtttactttgccgagtatttcattaaccagggactttttgaactcctctttttctggaacacttccctgagtcacgctcagcaataccgctggtaccagatgctgtaccaggctggcgtctttgcctcccgctcttctctccgctgctgtcgcatccgtttcacctgggccctggccctgctgcagtgcctcaacctggtgttcctgctggcagacgtgtggttcggctttctgccaagcatctacctcgtcttcctgatcattctgtatgaggggctcctgggaggcgcagcctacgtgaacaccttccacaacatcgccctggagaccagtgatgagcaccgggagtttgcaatggcggccacctgcatctctgacacactggggatctccctgtcggggctcctggctttgcctctgcatgacttcctctgccagctctcctgatactcgggatcctcaggacgcaggtcacattcacctgtgggcagagggacaggtcagacacccaggcccaccccagagaccctccatgaactgtgctcccagccttcccggcaggtctgggagtagggaagggctgaagccttgtttcccttgcaggggggccagccattgtctcccacttggggagtttcttcctggcatcatgccttctgaataaatgccgattttatccatggaaa

SEQ ID NO: 91 - RNA, 1797 nt, Homo sapiens
  source 1..1797: mol_type = mRNA
gtgctgtcacgtgatccgacaaacggcctctgcatagtgcagaacattctgctgctcttaaaggtacaggcctcagggtccctgctgtagacggggcgggggagagtacgatgggtggggcgtggtgggtcgtagggcgctcgagatggagcccccagcttccttgatggatcgcggggcgcgagtgccctagacaagccggagctgggaccggcaatcgggcgttgatccttgtcacctgtcgcagaccctcatccctcccgtgggagccccctttggacactctatgaccctggaccctcgggggacctgaacttgatgcgatgggaggctgtgcaggctcgcggcggcgcttttcggattccgagggctgctgggcctttgcaacaacttctcttatgtggtgatgctgagtgccgcccacgacatccttagccacaagaggacatcgggaaaccagagccatgtggacccaggcccaacgccgatcccccacaacagctcatcacgatttgactgcaactctgtctctacggctgctgtgctcctggcggacatcctccccacactcgtcatcaaattgttggctcctcttggccttcacctgctgccctacagcccccgggttctcgtcagtgggatttgtgctgctggaagcttcgtcctggttgccttttctcattctgtggggaccagcctgtgtggtgtggtcttcgctagcatctcatcaggccttggggaggtcaccttcctctccctcactgccttctaccccagggccgtgatctcctggtggtcctcagggactgggggagctgggctgctgggggccctgtcctacctgggcctcacccaggccggcctctcccctcagcagaccctgctgtccatgctgggtatccctgccctgctgctggccagctatttcttgttgctcacatctcctgaggcccaggaccctggaggggaagaagaagcagagagcgcagcccggcagcccctcataagaaccgaggccccggagtcgaagccaggctccagctccagcctctcccttcgggaaaggtggacagtgttcaagggtctgctgtggtacattgttcccttggtcgtagtttactttgccgagtatttcattaaccagggactttttgaactcctctttttctggaacacttccctgagtcacgctcagcaataccgctggtaccagatgctgtaccaggctggcgtctttgcctcccgctcttctctccgctgctgtcgcatccgtttcacctgggccctggccctgctgcagtgcctcaacctggtgttcctgctggcagacgtgtggttcggctttctgccaagcatctacctcgtcttcctgatcattctgtatgaggggctcctgggaggcgcagcctacgtgaacaccttccacaacatcgccctggagaccagtgatgagcaccgggagtttgcaatggcggccacctgcatctctgacacactggggatctccctgtcggggctcctggctttgcctctgcatgacttcctctgccagctctcctgatactcgggatcctcaggacgcaggtcacattcacctgtgggcagagggacaggtcagacacccaggcccaccccagagaccctccatgaactgtgctcccagccttcccggcaggtctgggagtagggaagggctgaagccttgtttcccttgcaggggggccagccattgtctcccacttggggagtttcttcctggcatcatgccttctgaataaatgccgattttatccatgg

SEQ ID NO: 92 - DNA, 67597 bp, Homo sapiens
  source 1..67597: mol_type = genomic DNA
cagcattaggccagtgcggccaaggagggatcaacatcactccgcacttacccggtttgtaccagcgagtgaagtatcgatccacgagcgaaggcaccaccggctccgcggcttcgggctcggtagccatggcgacctccggcgccgccacccccgccctccgggaccccagcgcttcctccgcgcagcccggactgggcgtgctcttccggcgcacagcgcgtgtcgtgcgcacgcgcgctgctctcaggtccgcaggttccacccccccccccgccccccccaattacagtgctttggggttcgacatcaaaacagagatcaaatacaaaagtttgggcagatgggcaagagggcagagggacaggggacgcggccaatgtagctcctctacctctacggtgccaggcctacaaagaaggccggccgccgtaagtgaccagaagcgggcccggcctcgccccctccgcctggtgacgtcactcccgcgccgcactcccagtgctgcggctgcctagttgacgcacccattgagtcgctggcttctttgcagcgcttcagcgttttcccctggagggcgcctccatccttggaggcctagtgccgtcggagagagagcgggagccgcggacagagacgcgtgcgcaattcggagccgactctgggtgcggactgtgggagctgactctgggtagccggctgcgcgtggctggggaggcgaggccggacgcacctctgtttgggggtcctcaggtaagcgatccatccagggtaggggcacgggagtggacctctccgccggcggtgtccgggtgaaggagacccggagcctcctctgcctgctgcgggccggggactggagtgcgggctgcaccacctctttcctagagccttaaattctttttgcagccttgccacctgctccatcgggggcgctgggaggcgcgacagcccagggatgcctgctgcccctccagccggacttaacccagcctcttgattgcttgcagggggttgataataacgctgaaagcgagagtattaattcacgatggaaggcggcggttaatagaggctcgggtgctgtggtgcgggtcctttctcgcgtgtgagactttttcgtggaggtggtgtcctctgtgcttctccatctaacgtggtgttttacgtggctttctctcccgttaacgatgatctccgtggagacagtggctgagtaatcttcagatcccagtacttagcaagtgctcagtcggtgttggatgtaggccacaaaccggatcgtaaagaattcaactgtatattgacagccacggaactaatcaatgaatagatccgtatgaagagtaagcaaaaaggcagcaaagacagtttttcagcttggggacatagagtagaaatggtctgtccccaaatagtgggaactgtcatttgggggaagaatagcaagttctttgctttccaggtcgcatttgatgtgcatgtgagacatgcttgtgattctatcaggaggttgaaaatgtgggtttagtggtaagtttgggctaattcagtcagggctaggcatttaggcctaatcagcgtattggtgatctacctggtatatgtaatcatgcatgtgatgtctagccaagaggtggatagtcgaaggagcaagggaagaaaatgaagcagttatcaggaaattaagagagaatccacgattgacctttggtgtggagggatctttagcacatttaagaactgcgaagagtttgaatcagtggaggcaggaaggttggaggttgcagatgtccaagaaagagtactaataggcctaggtcctgtggcaatatggaggatattcctttcctagcctggaaagaagtggagggaagtcttcctccgagaagataagggaataaggctgatgggtgtgaaatttcagagaaactagttttgaggcgtttttatgatgtttaaagatgaaaaacgcagccaggcacggtggctcaggcctgtaatcccagcactttgggaggcagaggcgggtggatcacttgaggttaggagttcaagaacagcctggccaacatggtgaaaccctgtctctactaaaaatacaaaaattaactgggcatggtgccgggcgcctgtaatcccagctactccggaggctgaggcaggagaatcgcttgaacccgggaggcagatgttgcggtgagccgagatcgcgccattgcaccccagcctgggcaataagagcgaaactccgtctcaaaaaacaaaaaaacctgcatgatatgttagaggttcaagtaatttctagcagttcttgaatataattgtcaccaaaacttactaaaatcattgtcttcctcacttccatcatatataaacttacctttctcttatcccacattatatattatataattcctatgacacttgacattatcttctgtgtactattaggattgattcatctttattctttctatgtcatacatatgtggggtgccaagatgagagaagtctccttggattaaagtgacaataagaccggtgtggtccttgtaattgctacccctaacataagttagggacttacaatcataagccttaaagggatctgaatataaataactagcacagtaacatttttttcccctacttaggtaatgttatgcatttaagcaagcctgattttgccagaccaaagtagatgtcttgtttagcactcttttctcacgttttatattgtcctgggaaaagcctggccagaagaacaaagttactggaagtagttatgtcaggtcatcagggtccttgaaatgttggtcatcattttgaagtaaattgttgtcatgtcccagtattttctcttcccctttagaacagtaaatgcttttctatctttgatttcagtttttttatgaatgtataaaaccagtttataaatgaatagacctggtgaatattaaagtcatttcagattctcttcaactgccagtatataaaaatggattttcaaatagtgctaatcagtgggatacccttttgtttttcctcatgattttataaagatgtcctaatatgcaaaaataaaatgtttccccattcatttgttctttcaactttcccaaaggaataactgatattacatcttttttgaagaaaacattctaaagttgagaatcttgcctctcctaaaaagaacataaaataggtttcagaattcctaatttgtagaccataactgtatagagtgggtcaggttgctgctataatccatacatgggtgtgtactcagagaggtaagttttttcttttcttggttattctgattctgactaccacttcttcaccccctgaatcatttcatttaaataaatatggtcatttatcactattaagctatttatttttctcttagagattaatgattcatcaagggatagttgtacttgtctcgtgggaatcacttcatcatgcgaaatctgaaattatttcggaccctggagttcagggatattcaaggtccagggaatcctcagtgcttctctctccgaactgaacaggggacggtgctcattggttcagaacatggcctgatagaagtagaccctgtctcaagagaagtaagttactgatgtagaatgccagcatgtgggtatgacccttgatttctcttcttccaaatttctttccccacatggtctttctttatatcttattgaatttatatcctcccaaataaacatcttttgcttcatatatatgccatgttagacatagcttaaatcgtaatccttctttaactctgctgctattttaacctaagtcagtagaactctgaccttactttttgagtgtgtgccgtactttttaccctctttgtcatgcaaattctgtttataagagtggttttttttttttttttttttgagacggagtctcgctctgtcacccaggctggagtgcagtggtgtgatcgtggctcactgcaagctccgcctccccgggttcacaccattctcctgcctcagcctcccgagaagctgggactacaggcgcccgccaccgcgcccggctaattttttgtatttttagtagatgtgcggtttcaccgtgttagccaggatggtcttgatctcctgacctcgtgatccgcctgcctcagcgcccggccaagagtggtttttaattgggaatgaacacgaaagttgcccatggagctttctaaaagtttgagcccacatctcatgtcaactaaatcagaatctttagtgttggctcctaactatatgtactttaaaaacctctgtgggttggttttgatatggtcccttgattatgttcttctactaatacattttaggcagttacatcctttagtgccttttccccatactatagaaatcttagaaaagcatagctattagcatcatattttagtggacaattttaaagagaccaggcttattgtttttgtttttgtgtttgtttggcaaaaaggtcacattacctatttttcttgttagagatgacagagtagtgatatttctcaaatgaaagtttggattttcatctagaaaaaatatttttgaaagcttttatgtaataaaagaagcattaaaaagtatttctggaaatgttatcaattattcttgaaagtagactgggttaatttgcttgtgtttactttggtgaaaggtgaaaaatgaagtttctttggtggcagaaggctttctcccagaggatggaagtggccgcattgttggtgttcaggacttgctggatcaggagtctgtgtgtgtggccacagcctctggagacgtcatactctgcagtctcagcacacaacaggtaagtggaagactccagtgaggggggagtctcaagcatcctcaaataggttacttgctatttgtggaagttttcaaatcagtagccataatagttacacttttgctaattaatttttgcattatatatttctttatttaaaaaattgttaacatggctttatctatatgttaagattcttctaaaactgagttttgtctgctgcatctattaatcagagtgatcagaatgttccaaatgagaatatatttttttaaaagttaaaactggctattcttatgtggtgtagatcacctcttatcagaccctcatcttgagttgcaacctttgtttctcaatttaggaagtctttgtttatctgacttagattttctgttatgaatgttgattggctaaatttagagtccctgaagtctaggcactaaagtaaatacattgtcattacctgcacatgtgatgactgccagtagagctagacttcaagcaattgcttctttctctactttagtgtatagttgagtttctgatttctatcctcaccttcttaacagcaagggtttcaaattacacttggctgattctttaaatcttcttccattacttcattagttgtgatctccttaacattgattatgtcacagaagttagagtattactaatagtaggataatgatagcagcttacatttattaactatcatgtgcctggcactttttaaagtgcttttcatgcaaatttatttaatcttcaccatgaccttatgcagtaggttgttgtttcctattcttcagaagaggcagttaaggcacagagtgcttaagtaattagaccagggtcacacagtaatcaaatggggtttgaccctagcagtctaaatctggcacctctgctcttaaccattccatttagtacaatcataaacctttacttgcagttcatggtgggaaatatcaaacttgtcatatacagcttgtttttttttcgtatttgaaagatagatgcttttactttccaaacattttgtagcattgtttcctggttactgagctcttccagtctatttatcttcatttaatggtgctgattctgccctttagtggcttctcaattgtctgaaaggtagagcccactattgtgccttataagcccctttcactatctgttccccacattcctttttagcctcatccccccattgttcctgtgtgtacgtaaaccttatgttttagttgcagctgatttttaactgctcttttttctggctttgtgcctctacactgtgttttcttcctggtctctctttcctgtccttattaccactctttgaaacacgtcagaaaaactttttctggactttgggccacttgtcattccctgtgctgagacgcattttgctttccagagatcttggtcattgctgttatcctctgtagggtcttcttttatctccctcgtgagacagctctgggaagaaaaagatatttatttctaatccctgtgcctaataacaggtctattctcttgatatccattactgaagaaatgtttgttgagtaagttcttgttttaatttttaaatataaatttttaatttttatgagtacatagtaggtacatatatttatgggctacatgagatgttctgatacaggcatgcagtgcaaaataaccacatcatggagaataggatatccatcccatcaagcgtttatcctttgtgttacaaacaatccaattacagtcttttagttattttaaaatgtgcaattactgttgactgtagttaccttgttgtgctatcaaatagcaggtcttatttattctatttttttttgtacctattaaccatcccaacttccctcagcccctcactacccttcccagcctctggtaaccatccttgtactctctgtgtccgtgagttcaattgttttgatttttagatcgcacaaataagtgagaacatgtgatgtttgtctttttgtgtctggtttatttcacttaatgtaatcatctccagttccatctatgttgttgcagatgacaggatcttattctttttttatggctgaatagtactccattgtgtatagtaccacaatttctttatccagtcatccattgatggacacttaggttgcttccaaatcttagctattgtgaacagagctgcaacaaacatgagagtgcagatatctcttccatatactgatgtcttttcgttttgtttttttaattgttttgattgaagttgcagtcagtttttactgagatgctagtgtttgaatctctcttttcaattttctctgtctcagctggagtgtgttgggagtgtagccagtggtatctctgttatgagttggagtcctgaccaagagctggtgcttcttgccacaggtaagcttgttactggtgcctcactggcttttttaaaacattattccagatgtcttacaggcttcatcagctttaggctgcttgaatttcaaaaaatttctttgaaccagtataataccaattatgaaccagtataataccaattatgtatgtgtgtgtgtatatatatataaaacgtagagtgatttttttttggtgactgaagttttgcctcttagtctatcattataaaaagttgtttcatgtaactttttaagtctttgggagtaagaaacaaagtcataaaacttggggaggctgctaagtccccagttagagttaaaaatgtcagcaatatgtattttaacttattctaagagttgctgtatggacacattctaaaagcccttcttgggttctgttgctgtttttcccctttaagtctcatcattccagatgagtttagtaaaccagctccactgatgacatttatatttagaggtatcttggggacaaggagtgttgaagttagtggaggagggctttgtggacttttaagttcaactgtacacacattaatagctgagcataagcaccaggtgacttatctagggaaagctttttggggttttttgtcattgttgtttttttaagtcaaagcattttggatgaattctgtctgctctgttcagactaactccagctccttagcttacagtgccataggtacttaggaatggcaaatttgttacatgaaaacaaaatcatttttgtttgtgtttctctaaggtcaacagaccctgattatgatgacaaaagattttgagccaatcctggagcagcagatccatcaggatgattttggtgaaagtaagtatagctttgtgcaatattttgtgacctacgtttcttcccatttttgaccatttccttgtgcactaatagccatgtcattaggccaaagaactgtgaaagttaaacccccagctattaaatgtctattagcccagttccttcagcccatcccaaatcttaaaaggcctactgatgcctctccaggtctgagggtttaaggtcacttagatagttattacccaaaccctaggaaagtcttaggctgggctttcagtgaaagggactgtacaaggtagtatttctgggatacagttttagggagaagaaaagaagaaagatggaatagaaggctggtttttgttactacgattagatccaatctgcatttccatgggaacaatcagattattttcttgctaaaatctagccaaggtcatctgggcattaaggctgtgggggtattgaagggcagtgcaggagaagagagacgcttattaagcataagctttggccatcttgaagtcacaaagtagctggcctgattgaagagggatggggaagaagatgttccaacttctgttatggtctaacttcctgccttcttgctccatcaactctgagaaatcatttagacaacttctacccatttatttacaaataatgtatttgttcagaaataattttggagggctgggcacagtggctcatgcctgtaatcccagcacttttggaggatgaggcaggaggattgcttgagcccaggagtttgatactagcctaggcaacgtagggagacccagcatctacaaagaatttaaaaattagctgggcttggtggtatcagcacagtaatgacatgatgtgcaggtactggggtagcataagggaaggaaacgagtaactagagagggatgatttatttcccctaggaggccaacttgagctgagtctcagctgaattggtgttgggtaggtgagggataagggtggggagtagtcagctgaattggtattgggcaggtgagggataagggtttggagtagtcagctgaattggtattgggtaggtgagggataagggtggggaacagtccaagcaagtgaatgtgtccatttcaagtgtccatttcaagggagggttatttcatagaaacattgtgggttactcagggaactgtgagtaattcagcattgctgaagtggcagaatgtgagtgtagaatgaaataaatggaacagatttgattgagtttgtagtagggaatatggacattgagttatagttgatcagccattacaagttttgatgataagaggtttaaagagatttatttaatagaaagatggctcgtgatggcatatttttgttgtttttgtgtgtggagagggaagagatgagaggcagggtgatcaggtaggaggttgctacaggaatccagatgaaagataaggaaggtttgtgtggggctagaagcaggaatcattcaggaaaaaacttgattcacaatgaggatgggagtacattttttagaattagctgggaaacttttttagaatatatgtgcatgattccccttctgccctaggccagtttgagaaataccaatttagaaagtgaaataaataggctttgcgtatgtaaggtgaataagaaaaagttgagcaggactccagccagaacctcaggtgttgggaataaagatgccagtaacagggaagatggagaagtgctggtctgtaaggggtgggtggtgagatctgttttggatttgttgaaggaccatatgtgattgccatgtggagtatgcaaatataaggctgaagctcaggagaggccagagctatggactgagagtagtgggtatgtaggaaattctgacagttttgggaacagatggactgtctcagggagcagatgctgtacaggaagagtctagaatccagggtggaactctggggcatccagctttgaggacagtcagagagagagtaacagcacacagtatactttgggatgggaaagtgctctgggcctggtgtttcccactgactttttcacacaaatcctaatgcagtaaatcaaaggaaatgtaggccaagttaagatcttaggtctcagaaatgtgtttctcagtacaaaaaaaaaaaaatcattctatggagtgatgaatatttttcctctatcctggggtcagtagacttgttctgaaaagggctaggtcatgaatatgttcagctttgcaggctgtatgatctgtgttgcagctgctcaattctaatgttgaggtgtgaaagttatacatgatacataagcacatctatgttccagtaaacgtttgtttgtaaaagcagatgtaggctgtagttttgcaaatccctgctgtaaccgcatcatttcttgtcttccattggaaaagttctctttcttcattccttggtccttaatctttctgtggaaacttgcagatagaagcctgggggtttgcaccaggatagtcactaccatttgtacgcagcagcaattgaggtactgtagcacttggatgtgagcagacaggaaatggtcatatggacccataatttataggaattgcaaacagccctgcttcatcagaatcagaatcaatggcaggaggaaagtattgggtcctggattaggtgatgttttcaggaccatctttattgtgcttcttgcaaatggatcctacctccaggaacagaagggttgtgttgtttcagcaactctgcctaatagtttatataagagaagtgttacgatctagaaagaaccccagtcagcctggaaggcagaagacctgtgttctaacttttggctccaccattagggagggtctcaatctctaagtctatgtgaggagctgttttgtgacctgcagcccctctatcaccagtgagagcttgcaatcagaattttattcccagttctcatcttggggttttatgttccggacatattttgtaaactctttatgtttcattcttcttacttataaggtgagggtgagatcgctgacttgtgtcatcaaagaaacttggaatatgtaagatggcagtaaaatgctttccaaaataaggaagggcatttcaaattcttcaaagtcactgctgcatataatatgaaatgggttttgtttgtttgttttgagatgggggtctcgctgtgttacccaggctagagagtgcagtagtacaatcagggctcactgcagccttgaactcctgggttcaagtgatcctcctactttagtctcttgagtagctgggaccacaggtgtgtgccatcatgtccagcttattttgtatactttttgtagagatgggtgtctccctatgttgcccaggctggtctcgaactcctggactcaagtgatcctcctgcctcagcctcccaaagtgttgggactataggcatgagccaccatgcccagcctgaaacataggtttctcaaatattgactgctggtcaatttattgagaggcgttagaggacctgagtaattgccaatgactaacttcatgaagaatagcagtgaaactgtttttgtttcatttcatgtggcttattagttgtcttgccaattgttctgtaggcaagtttatcactgttggatggggtaggaaggagacacagttccatggatcagaaggcagacaagcagcttttcagatgcaaatggtaagtttggtttgatggataaaaagccttgactggaacaaatgtaagtttgccacccaccaggaactctttggtgtccacttagatgccagtaatgaacagttctcttctgctttagtaaaactgcctagaaccttcaggaaatgaatccctctagaaagatcctttttttccttgttattgccaagttgctttgtgatttattttcatagtagcaaataattataaccaatattcatcacccagtttaaaaaataaaacatcacagacaaaggaaaccccctgtgtatcccgtcccgatgtccctccccttcctctccagagagagctgccatccttcattcacatgcatgttctcatacttttcccatatatgtgtatattagatatttttctttttctgttggatgaaactctttgttttccttacttctggattggaaaattctgaagaccatataatgatgtcttgatgactcaaggcaggactttttaatcttctaatgtaggcggggcggcccctgaaggcagaggtgtgtggacacaagaagagtgcagactcttggggcacctggggaagtagtgtccgtgtcacattaaattcatttaaactcttatattttattttaatttatacaatatgaatattttttaaaactatgaattgaaaagtattacccttgagtaaaattaatgccccaagaagatgtgccatatttaccctctggcacactaccaagtacccccaggggcattacagatctctgttagaaaagtacagattacattatcctcataacatttagaagctatgagaccttggcagggaagtttcctaatgtttctgagcctcagtattctctgtaaagtggacaacataatgtctccttacaagggttgagatgggcaggtaatagcatatataaaacagctatcatagcatcagcacagtgtaggcactcaaatggtagttgctgcttttgttttagtagacaaataatttttgaaactttttaaagcgtagtttttatttcaaaacaactttattgtgagtaaaatatgcatagtgggtctaatttaacattctgaaagctattgacttattagaacagtaaaggattattagagggcagaaacatggagtaagtactctgagacacaaccttgcttctttgggggtgatccactacaactgcccagctttggacaagtggttttcatgtccccctgatttttaagtgattttttttttttttggcaggacttaaaaggtatccttgactaaacaggaacttgaccaagtaaatagttggtgcaatttgaatattctttcttgctataagcaacaagtaaattatggtacagctttctaagaccatatcttttcgatttaaaaatagcactttactcatacatgttatgacatgggtaaacctcataaagattatgctaagtgaaagaagccagtcataaaagatcacatataatatgatcccatttgtatgaagtgcccagaaggggcaaatccacagaggcagaaagtagagtagtggttgggtagggctgtggggtggggtggggaaggggtgactgctaatggatatggggtttcttttggggatgatgaaaatgctcaaaatttagattatggtgatggctattcaactttgtaaatatactttaaaaacattgattcttaccactgagtttaaacaaccaaaaaaaaatcccaaggtgcattgaattgtgtacttcaaatgggtgaaccttaataatatgtaaattatatcccagtaaaggtgttaaaaaatagtactttaaaggaatctatggtagttttgaaaataaggcagttttccatactttgttaaactctggagaagatgacactttactactggtacctgctagagtaagacttatctagtattaacaaaattagggtttattaatggtataggatgatccaggtaatgggggaaaaaaaccgagcatcctgttatctaatgtactatccagtaaactactctagctttttttcatgaactttttctaaaggctttctagggcctcgtcttggtttgaaagttcacagctacccttcagaaaagaaaacaaaaatccatggagtaggcagatacaagtactcatgtgagcataatttactttgattttttaagttgtgttattctagccctcagcctgttccctgcctgggctctcctagtgcccagtaacactgattcaagaggttgcatttagctgggcacagtggctgatgcctgcaatcccagcactttgggaggccaagttgggcagatcacctgaggtcaggagttcaagaccagcatgtccaacatggtgaaatcctatctctactaaaaatacaaaaattagccaggcatggtggcagatgcctgtaatctcagctacttgagaagctaaggtagtagaatcacttgtacctgggaggcagaggttgcggtgagccaagattgtgccactgcactccagcctgggccataaagcaagactccgtctcaaaaaaaaaaaaaaaaaaattgggtgagagggaggaattgaggaggataccaagggttgggcctgaacaaatggaagcataattatatgtagaaatttctatgagctactcttctagaatagatgactcaataataccctgcttgccatctacgttttctgtccttaattatttccagttctatttcatataatgcctatttcaggccttaacccttcagtaaaggaggtttggtttctataccctaggacagtttcattgagaataaattttgttaggctacctatgtattccctactgtgcagactacagtacagtactagcagaattcttaggctgttactagaatatgatgatgaatgcccgggtggtcatctgtctcccacccggtagagttggcttcaggattgagatacacgtggccctggaggagacgtttcttcccgtcatgctgcagaatgagaacatttccatgttttcgtcattgtctgctgctgcctttaccacctctgtggctcctccctattcaccttgttcacatcttaactcatctgtgccctgttgtgaagcttacacaatatgtaaacaaaactctaccctgttggacaaatggaacacttgtttccttgttgtagttacctgataggttccttagctcattatattcaggatctagatctgtagctcttttcctcttttgctgttctcagaggccactttttttttttttaatgccgaaaggaggattttgtttgttttacatttttttcttctttttgatgatttctgcgttctaagaaccaacccttggatggtttctgattctagaggcaggctttcaaagtagcttaaacctcttaaaaaacatctgtatctagtggtctgaggcttgtttgattctgggatacttaaggtcccccagtaatattggtgtttgttcccctttttagcatgagtctgctttgccctgggatgaccatagaccacaagttacctggcggggggatggacagttttttgctgtgagtgttgtttgcccagaaacaggtatggaaatatattgcagttaaacaacaataaaaaatttttatcttattaaaattaaggaaaattttctttcttttgctttgagtagggtattaattatacatatgaggcaaggatgtgctgctttaaatgtgaaatgaggttagagttaagaattagaagagtcctttgaggccatttggtccatcctcctacctggtggacacaaatttgtaacaaaattaatctaattggctatgtaaaaccatggcagtttttatttgtaaggaaggtgtttgaatagttctgaattgacaacttttatcataatgttttaagtgtgtatgtgtgtttgactccactcccgcacaggggctcggaaggtcagagtgtggaaccgagagtttgctttgcagtcaaccagtgagcctgtggcaggactgggaccagccctggcttggaagtgagtgggagaagaaaccttagagaaattcttggaaccagagtagaggtggtggtacacatggatacagatgatacagatgtttgtgtaacacaaaaggatttttacgtttcttcatttggttataaggctgtatctatctttgtttcttcttttttttttttcttattccctgaagtctgaattcaactcgaatagtagattttacgcttcttcacagatttcattgttccaaggccgcatatattttgcattcctaactcttaaaaggctgtggttttaaggcagggtatatatgaagccattgtacagagcagaaaatggtgtttagaagggaaggcccagtttgcaaggctctgtggggcaaatggtgcttttgtggaaattagggaaagagcctccttccttggcacaaaattcctacagcagaggatctgcttgccaaggagcatgcaggctggattcagaccctgctctttccttccattctcctccttggcccagtacccttgtgcaggttacaatttgcctgtcatatgtggctgcctgattttagatagaagatgtatctcctctgtttcggtgatatctgttgtatgtagacctcttgtttcccaccagtatctgaatggtattatatgatagagcagaagagaaatgtatttgaattaaaaccctagagacaaatatgaataagatgaggcaattaagatgttttcaacatttggtgaagtcttaaaaaagacctactggagcatagaatatttgctgaagttgtataatggaaggagaaatagattttgatttttaggacattatacctggaatggtttagataacttattatttttaaagtcatccaaatgcaatgtaaatatgtaaggttttgtgggcaaatggagcctctgtgtaaaacaggaaaaggcactctttcctctgggcaagtacagtcccacagtgggatgaaccgctcgccgagagacaagggacacatgggatttaaaacttccttggataaagatattcattaattcgttcattcattcattcatgtttgctggaaaaaaaactcttctggattttatctattctttagttaggtgagctttcgatattgtaacactctgagtttgctttaagaccctcaggcagtttgattgcatctacacaagataaacccaaccagcaggatattgtgttttttgagaaaaatggactccttcatggacactttacacttcccttccttaaagatgaggttaaggtaagtgcctgagtttgtttcaccctcgaatgtagaggactttccatagctatagagggaattttttttttttttttttgagatggagtttcattcttgttgcccaggttggagtgcgatagtgcaatctcggttcactgcaacctccgcctcctaggttcaagtgattctcctgcctcagcctcccgagtagctgggattacaggcttgcgccaccacagccagctaattttgtatttttagtagagacggggtttctccgtgttggtcaggctggtctcaaacccctgacctcaggtgatccacccgcctctgcctcccaaagtgctgggattacaggcgtgagccaccacgcctggcctatagaggggatttatatttgatatggatatataaatagtagctttagagtaaatagtaataaaaatggtggcttcctagaactgatttttatttaataaaatattgtttttccagtgattttgcaaataatagcatttgtcccccaccttagataaaacagaagtaggaaataaaaatgctagtttttattgtttattttgacaaaagcataatttttccagtaatgaagatgtttttcatttataacatttaaatcttaagtggtttgtataccattaagattcttgctgaagtgagaacacatcaaatggtatctctgtgtaaaattttaaacatcctaagttgagagacgagtttaatgaactcccatgtaactattactcactttcagtagataccaacattttgcaaaactattttcatcggtccgcaactctttggcctatacatatatatacttacatatatttttatttcctggagttttaattctagaaatcatattttcaatatttatttataacagttaaggacatttttctttacataaccataattctattattacatcttatctctgtgttgtctaacacccagtccatattccagtttctctgattgtctaaaaatgtcaccttgtatttggttaagtttcttaagtctcttttaatctttaagcataatgtatttcttttttttaagtcctctacataataatgacatattttacagatttgtttaatgcctctgtaggttagtgatttacagctagggatgagctcaggtagtgggattatttgatttgagagaggaaatacagctattataaagatttggaagtaaatccataactgaaagccaatgacagatcttttttcccttctaggtaaatgacttgctctggaatgcagattcctctgtgcttgcagtctggctggaagaccttcagagagaagaaagctccattccgaaaacctgtggtaagacagctgtagtaccccagccttctgccccataaaacgtagttgaaagtagacaggtatgggatttccttcatcccttctacttagtcccttagtagaatcaaagatgctgaagtgggtaggtggaaatgggggtggttaggttttgattgattgtggatttcagtcatgtattggttggggttctctagagaaacaaataatacatatatataattcgtccctcagtattctcgggggattagttctaggattgcccatggacgccaaaatccacacatggtcaagtcctgcagtcaaccctgcagaacactcagatatgaaaagtcagccttttgtatacttgggttttgcattcctcaagtaccatatttttgatgtgcgtttggttgcgggtatagaatccacaatatgaagggccgactgtattcattgaaaaaaatacgaatataaatggacctgtgtagttcaagcctgtgttgttcaagggtcagctgtacttacatagagagacggtgagagagggaatagggtggggcgggagggagagagagtaatagagtgtggatagatttactttaaaagattagctaatgtaggggatggcaagtttgaaatttgtgggggcaggttggcaggctggaaattcaggtaagaattgatgttgctgtcttgagtatgaaatctgtagggcaggctggaaacttagggaggatttctgttacagccttaaggcagaatttcttcttttctgcgaagcctcagtttttgcttttaaggtcttcagctgaatgaatgggaccttcccacattatggggaataatctgctttccttatagtcagccgattataaatattaatcacatctacagaataccttcacagcaacatctggagtttagcagatagctgggtgccatagcctagccaacttgacacaataaaattaactgttgtaagtcatcacgtgctttccctagtgcatggtattaccacagaaaaaacactaaccaaaggaattctgtggacgtgaaagaagatttagattaagcgtaaaagtaagaatatttttatagcttttaaaatgtataagtgtgtggttttaagtattaaataatacttgaaaatgttagaaaataagatgagaaaaaaatctcatagttctaccacttcgtaataatcactattcaaattttcttgtcttctaggtttttcatgtatatatctcagtatagctatcatcttgtttttgttaaaagtgtagtaggtatgggccaggtgcggtggctcatgcactttgggggcccagcactttgggaggccgaggcgggcggatcacgaggtcaggagatcgagaccatcctggctaacacggtgtaaccccatctctactaaaaatacaaaaaattagctgggcgtggtggcaggcgcctgtagtcccagctactcaggaggctgaggcaggagaatggtgtgaacctggaggaggcggagcttgcagtgaatggagatcgtgccactgcactccagccttggcgacagagtgagactgtctcaaaacaaaacaaaaaaaagtgtaggtgtgatacatctgcatcattttaaattgctgtataatactcgtttattctcgttcattaaatctcatgctgttagacatttacagttttgtcatttctcattattgtaaacagcaatgcatggtacatttttgttcataaatctttttacttgattattttctaagtagctttcaaactctttaatcagtagaaccccccccccctttttttttttttttggagacggagtctctctctttcccccaggctggagtgcagtggcccgatctcggtcactgcaagctctgcctcccgggttcactccattttcctgcctcagcttcccgagtagctgggtctacaggcgcccgccaccaagcctggctaattttttgtatttttggtagaggcagggtttcaccgcgttagccaggatggtctcgatctccatctcgtgatctgcccgtctcggcctcccaaagtgctgggattacaggcgtgagccaccgtgcccggcctcagtagaacccttttaactgcaatgttaagaaactcattattcattcaacacaatagttcttaaccctggccacacctttagaaaaaaaatgatattcaggcttcatctcaagagttcagttcagtgtgttggaatggagattatacgtaagtatttaattaaaaaccaaaagcccccaagtgattttaaacagccgcagttgagaaccaccgattaaccagtgtgtcaagggatggcactgtgatatgctgagcataaaaatattgcacaggatgaaaccctgtctctactaaaaatgcaaaaattagtccggcgtggtggtgcgcgcctgtagtcctagctactcgggaggctgagacaagggaatcgcttgaactgggaggcagaggttgccgtgagccgagattgagccactgcactccagcatgggtgacagagtgagactccatctcaaaaacatgtatatatatatatacacacacacacacattgcacaagaacagccacaacatctgtgctcacagaacatcagcatgtggtctaacttcaaagtgttgtaataatgcggtttgagactaggttatgtttgctgtgatcactaagttaagcattagtgagcaaggagattgagaaaatccttaatataaataatatttcttaatataactataattcctaatataactaaggtcttaatttatatgtcatctgtttagtaaaggttggttttggcatgattaagtcttgcttgcttaatagatgttggaaggataatttcatgcttatcttctttggacagctgaatcaggattaatacccagatagccttgaacataagtgcttgcaaagcacctgaaagaaaataagcatcttaagcccaatacaacacaatgatgctagtctagatcttggattaagtgttttaatacttttactctaattgccaagttatcttcttcctaaatcttcatgagaaaacccactaaaagaatgctttttcctggtagccttccattgtgatcataaagtttggaagtaaagttgaaaataaacatgtgggccaggcacggtggctcaggcctgtaatctcagcactttgggaggccgaggcaggcggatcacaaggtcaggagatcaagaccatcctggctaacacggtgaaaccatgtttctactaaaaatacaaaaaaaaaaaattagccgggtgtggtggtgggcgcctgtagtcctagctactcgagaggctgaggcaggagaatggcatgaacccgggagatggagcttgcagtgagccgagattgcgccactgcactccagcctggccggcagagcgagactctgtgtcaataaaaaaaaaaaaaaaacgaaaataaacatatgaataaaagttaaaaatagaaaaaaaacaagaaaataaacatatatttctgaccttattgattcttgatattttatctgcatggaaagctattttttggcagttattattgttcttattttagagacgaggctgagcaggaagggtcctttgaaaaagaaaagattgcccttgaacccctctggcaagtgggatgaagtctgcttcccagcctctaacggccttcttttcattttcccttgcagttcagctctggactgttggaaactatcactggtatctcaagcaaagtttatccttcagcacctgtgggaagagcaagattgtgtctctgatgtgggaccctgtgaccccataccggctgcatgttctctgtcagggctggcattacctcgcctatgattggcactggacgactgaccggagcgtgggagataattcaagtgacttgtccaatgtggctgtcattgatggaagtaagctcctgggaagtgtgtccatgagcctgcaaggggtcctgagcctagggcctgcagatgtggtggtttgactggaacagtggggaatctttatttgttttggctgtttgggttacttgtttttttattgaatgggatataaggtggggtatgttctctcctgagaaccattgtcccccctcccccaccagtttcctgttatactgcatctgtggccttcacacgtttacttgcctggcctttgaagacactgaaaactttgactctaggtagagaggatgacaacagtacagtcttgtgggattgggtgtgttagctttatctgtttgccctgacacagatttataattgacccttataccaccccacttgtgttgctttgtttcctgatacaaatgcttgctgatatatacctctccagtatgttcagttcatgcataaacgtttgcctaatatgaagattaggtttatattttataatgaggtagaaggtttttttagggggtggggtgggaagggcaagactgaagagtgaagtagtcaccttaatgaatagtttcattgctgatatgaaagggagcactggcttctaagattgtaatgtgaggtggtatattaattcatattctgtgtaatattctacataatactgattttatagtcatgtattctatatagagaacttaatcagatctgcgttattaccaaatccacacataggaaagtgctttaaggattttgaaagtattaattcccttggtttagtgtggcttggttgcaggcccaggtttaaagctagaggtctgacctcttggcctttttgccttagtccctggcacctgaaactccaggtactgagatggactcccctaggcctagaggtgacaatagccaattatggacagaacccatgacatttccccatcccacactgtttttagacttgttcctgagaaaaacattgaaagttatttttttgtgaattgccattattgtttagatatactgtgatgttcagatggcttatcttacaaattgaatatccctaggtctaatcctcttctttctttttcactgcagacagggtgttggtgacagtcttccggcagactgtggttccgcctcccatgtgcacctaccaactgctgttcccacaccctgtgaatcaagtcacattcttagcacaccctcaaaagagtaatgaccttgctgttctagatgccagtaaccagatttctgtttataaatgtggtatgttataaaacttttgccaagatgttctgaatcaagtcccttctactcctacataaaagcaaattatagtttggtgttgccataggtctagtgtttctcaaaatttttaagtctgcagttgatatcattatcattatgatatttaattgccttgggtttttgttttttttttttttaatcctatactggtttgtacgagccattccttttcccttactgacttgaagagtcagttatttaagaataacattggactctggaaataacatagtatgttatacattgttaacatgttttactcttttcatagcctttacacatattttcagttgatctcatccctcctaggagctgtgtcagagatggggttttcctcttttgtagatgagggaacacagtgtcagaggttttgtaatttgtttgaacaagaatggacaaggacctcaacacaggtgttctagctcctaatccacttgtcctgccacagccccattgctgtcagttcttcattactttcctgatgtgctggagaatctgaaatttgtttttacttgtgagttctgtggttatgtcataaattctgctggcatatggcagtgttagccttgttttcaaatatcttttgaattctcagaaaaagcctagatagttgccaagagagaataatcaaaattaattaatttaaatgggaagtccttactttcatatcagcttttctgttaagtcagcagcccactgtgtacatggatcctatctggatgtatcaccagtttctctgattatagtttcagtgtgtaaaatgctgttacagtcctccttaaacttttcaaaatagctttaaaaaaaagtgcaaatatgttcattgtcaaggcaaaaagaatcagatgtaagcttttgtgggacttaactgtatgatgctaatgagtttatatgtcactttatgatgtatggtatgttttgttctgcattcacttaaaaaatagctttatatcattcatctatttaaagtgtacaattcaatggtttatatgtgtgtgtatgaatatatatacatatgtatatgtatatatatgtatattcacagagttgtacagccatcaccacgatcaattttaggacgtttttatctcctcagaatgaaaccctgtaccaccctgcattcattttacttgagagaaaactccctgtgatgagataggacaggttgagagctccacttttgaaagattgttcggcatcaatatgtggggttggccataggtcaggggcacctggaggcagagattctagttaggagaagctgttgtcaagtgtccaggcaggagctagcaagagcttgagccagagcagtgttcatagaaatggaaagaagagaaagatcataacaaatccatgaagtaaaaaccctgagaagttaaagaacccactggggagagtttggatataagagaatctggaaaaagagatcttggactggaacaggtcagggctccgtgcccaagtggaagggaaattaagaacttggagtcaagtggtagacatttgagtggtgtggagacaagttcgttgccaaagttttcaaagatggtgtttgatgcatcctgagtatcactcctttttccccctcattgcttcttgattgtttattatatgccaggcttttttctagtacttggcttgttgtactagaaaactagttgtactttgtctacaacttgttgttctaggtgtagacaaaagatatcaattaaatatgatctatcagatggcaagtgctgtggagaaaaattaagcaaaataaggggtagggagagcttaaggataagggtttacagggggaaggtgtctttcctatttagtgtgatcccaaaggcctctctgtgaaggtgacattgaagcagagacctggtgagaatcacagtgggagccacgcagacatctggggtaagagcgtcccaagcattctatgcttgaaggcaaagaagaaaaaagaaagagcgttccaagcagagtaaaaagcaaccaccgaagtgcctgttgtgtttaggaaatagccaggaggccagggtggctgcagcagagcaaaggaggggaaggtggtgggtgagttcagagtggtgatgggaatctgctcttgtagggccttgcggcttttactccgagtgagataggagccaccagagggcttagaacagaggagtgcagtgttctggctgaattttttaaaggcttgcattggctgctgtgcagtgaataaactggatgaagaatagaaagaaaatgtcttttaagcaggtgcttaggactttggagaatttgaggatattgagaggtggttgaagacagtggaggaaattgtccacagcactgggctgagagggtagccccttcacctggtcttgctgagatgtggcctttgtcagggaagattatgactgatgtgttcttaagaggaaagcagaaattttaaggaggttgagatgtgattattttctagattgctgtttgccttctagaactcattaattgcagacaccatccccttagtattaggtgaaatcttataatttacgatgataatatttgcatttttgttttccaggtgattgtccaagtgctgaccctacagtgaaactgggagctgtgggtggaagtggatttaaagtttgccttagaactcctcatttggaaaagagatacaagtaggttcttaattatcttgggcttctgggaacagaatcagccagcatgcagtcctaaattcagccatctgataacagttctatgcctgttgctgagtggaacaagaaataaagacaacacccaggccctgactttcggatctgattggagaagccagtcatgtagtttgtctgaatgccatataatttgataggtagcaggagagcatgagttgtaagccagcctaggacctactcccaatagcgcttggttctccaggaaaaatcatgtgggaaagatggagatgacaatgataaggcggagctgcattctcttacataaatggggatgtatgggttgttaacatggatgacctaatgcagcctctgtctttgctccatcccagaatctagaacttctgggtgctgtgctttgaggctcctgggatggaaatcagaatgcattcttccattgaaacagtattgtaaacaattggatgttattgaatacctcaggtacactataggcatttgcaaaatgacctagaaaccaaattataatgccacatctgtgagagaacttttttaaaaagtaccacttattgagtacttacagattaaaaaaacaaagtgtagaggttaggtaacttacccaaggtcatggacctggtaactagagaatttagggtttgattctattctgtttgataagtccatgttcttcattactaaactactctgcctccagggaacatttattgttagattaatagaaataattaactgagtacaacaaatagcagaatttaataaataatgtttcttaaatatatgtgatatatttaataaatacagcagaagtgttcaacctctgtatgattttgaggctgcctgtataatgcttagtagtttttaaagagcatttacatgcattatttcacttcatagacttgaaaccactagagtagagatagaggacaaattagaaagtatgaggcagtttagaatatagtttcatttaaaaaaaattgatggggataatgccaattcgtctgagatttcacagaagacatgagtactcatcgtgatcttggggaagggataggtttggggttggcaaagaattgggaacattgggtctggtggggaagaaagtgtcagtgaaaaccagaggtgggactgatcctccatgggatactctatgtgaatgcaatggagagcctgagtccggggagagatgtttgaggaggaagatcaggctagtgaccaacttcttcagtgggagctgcggatttgccacctgatctaaaaggcaggaagtagccattgtcggttcctacgtgaggtgacaagaacagtgcgctggtcaggtgtataaatgctaccaaagaatgcattagagacatggagaccatctctcaagctagtcagtcagtttaatgtgaggtgcttaggaaaggacccattctactgcaagtgacatacctgccagagcctggtttgaatgctggtaagtcatggcagtggaaaagctctggggttcattagtgtagggactagggctggtaattttcttgtgtagtcagtttcctcaagtgttctcttcaaatttaaagatttcagggtatgagaaatttagggaaaatataaaaacgtattcttaagccagacaaagattaattttagattttgtagtatttggtagtatctcaggttttgtccctccaaataattaggagtggactgtatacaagatgcttcagtcttccttcatccaggaacgtctcagtggtttttaagttttattcatgtcttggatattcttcaatatttacaatagaatccagtttgagaataatgaagatcaagatgtaaacccgctgaaactaggccttctcacttggattgaagaagacgtcttcctggctgtaagccacagtgagttcagcccccggtctgtcattcaccatttgactgcagcttcttctgagatggatgaagagcatggacagctcaatgtcaggtattgcagtttttccctgtactccacatgttaagcaaatggagttaggtttttgtcttttatgagcatacaacttttgacttctattgatcaaggttgaggagcagtagctttcttgttagacacacttaacaagaaggttaagtctagttatgagccatgtcaaaataacagaccaaaaatatatcaaaaagtggtgaaaaataggataaatattagtagatgaagcaactttttaaagatatgttaaatattttaatttagcatctacccacatttttccagcgtgattgttatatgttataattgattttaataactgtcaagcataattagagtggctaattctcatgggctaatgtgatgggaagaaattttgtataaatgcagtcatgcgcatatatgtgtgtgtgtgtgtgtgtgtgtgtgtgtgtatacataccttttctatgtttagatacacaaatacttgacatggtattacaattgcctgtagtattctgtaaagtaacatgctgtccaggtttgtagcctggtagcaataggccataccccataggctaggggtgtagtaggctacaccacctaggtttgtgtaagtactctatgatgtttgcacaatgatgaaatcacctaacaacacatttctcagacgtatccccatcgttaaatgatgcataattgcacatatatgctttgttttgatgtggtgacttcaaaatgcttcttccagcctcctcttctatatatcctattttgtacctgactacatttaccattagaaagtctctattcttctttgctgaaatttcactgttctctgggcctgagttttgttttgattcctgactatatcttcattatgtaacaggtttcagttaatgaatgctcttctgtgtaatgtaagccctgttgtatagttgatagcattttctagccagttcccagaactccttgtttccagtgtcaatacttggcacctttgtccactgacactaatccccagattaatttgtaattaaagccctactggtgagatttctgagaaacgttgttgcaaaattaggaacctttcctttatatatatacattacataaatttatagacataaaacattttaatgcagtcatttgctgctactctttgactcatagtctttcgtgatattttgaaaaagccttttgttaacatgtctaaatgcagaatatgttctagaaatatgtagcacttaaagtaagccattagattaccttttgaaaagcggagcaatttactaagtttctacttcttcagatttgaaattcttcatcattagcttgtagaggcaaaagcttgatgcagtcatctcatttgctgtaaaggaaatgagaagtcatttacagtatatttctactgctttgacttttatttctcaaaaagactgttttgttcatataaaatattaatgcttttgaggactacaaagtccctcgatttagtttacatttactttagcttatactttgtaaaaaatactcttctaaatgctttgtctgttttagcttacttatttctcataatacctctgtaaagtatatgccatttgcaccatcattttacagatgagacaactaagacatggagcagttagataacttgcctgagatcatgcaggtggagccaggatcaaatcccagcgagtctagctccagagtttgttctcttcttgacagataatttatcctcacaaaatttgaagcatttgtagaggaattccctattgttataatgtttagtttttttgtagattggttaaaaactttgaattaaatgttagcattaacatcatttgcttttatcactacttctttgtctcttttttctttttttaatcactacctcttcctcctcttttgagaaattctgcttccgtggctatggtccaagctacttgagaaggtgaggtgggaggatcacttgagcctaggaggttgagattgcggtgagctgtgattgtgtcaactgcatttcaacctgggcaacagagcaagacactgtccaaaaaaaaaaaaaaaaatagtgaaattttacttcgctccattgactcagggaaaaaatgtaatggtgataacaaattcccttcatctcattagtgaaaatccacaattttccatcaatcgatatgatagtgatagagatattgagtgtgctcattttcctacagaccagctgctttaactattttaagcagacagaaatgatattggtaccatccatgtctaatgaaggcaatactttgtaataagttgcagtaagttgtggccagaagaggaatgatgacttcacagtgtaaacaactaccttattgggtttgtggaaaatggtgtcatgtagcagatgtggctttatctgggctttggtttggagtagttttatctattcatctaaccgtctgtctctaagtgtataagtgtgtgtgtgtgtgtgtgtgtgtgtgtatagtattgggtgtgtatatatgtattttgtctacattgtattgaagtaggtagtgcagcatcaaaaggaaattgttgattttcaaaatcagtgaaatgtcactatttttgagaaaaatggtctgtttacactcccttctccttttttttgtcagttcatctgcagcggtggatggggtcataatcagtctatgttgcaattccaagaccaagtcagtagtattacagctggctgatggccagatatttaagtacctttggggtgagtatcaaggtgttaggaaagcatgttatgacttacatagatgcttagttcttaagaacatgtacttgtatcttgtcagttcaatattgattgtcaggtcttttaactaccctggaaaaccctaagctttagagtggaattggcaagtgtattctactcctgtttcctcttttaatgaactaacgtactcttaaaaaagtgattgatgactatcgcagggacaaaaaaccaaacaccgcatgttctcactcataggtgggaactgaacagtgagaacacttggacacaggaaggagaacatcacacacctgggcctgtcgtggggtgggggagggtggagggatagcattaggagatatacctaatgtaaatgacaagttaatgggtgcagcacaccaacatggcacatgtatacatatgtaacaaacctgcacattgtgcacatgtaccctagaacttaaagtataataaaaatatatatataaataaataatgccagcattagagaaaaaaagtgattgaaattgcatgttaagtgttttagcaaatgttgatgttgatggttttttgcaaagagcgcatcagctatttgtgaactagatctgtgaatcttgcagagtcaccttctctggctattaaaccatggaagaactctggtggatttcctgttcggtttccttatccatgcacccagaccgaattggccatgattggagaagaggtaggtgaacacggagcaggaaatttacttaaagtagttacccagggactgatggcattaagtagaaagagcgtgggctttggaggtggacttgggtctccactaaatgcctagacaatagtgggaaatgatctcactttcataagccacaccttattcatctataaaatgggaaaatcagtatctgtctatcagggttcagaagactaaatgagataatatatgtgattagcaaccttttatccctagttgtacaaatcattcaaagttaattttatttaggaggggaaacagaaatgtgatcttgagaatagttttagtagatttttattcaacacatactagaatgcctataattgtggtggatggtagaatgcagtggctggaaaacaaaaccgcttgactaattcctgctcttctggaacttgtgatctattaatttcaatgtaatgattccctttgttgggagtgtgatggaaatggacagagtatactggtagagaatactgagatgtttgaggggtaatttgaggatggtggctatgagaatgggagtcctgcatctggtggtccaggaaggcctctcggaggcagtgatgtgtgtgctgagatgtgaagaaaaagaaggctctgtctccaggcagaaggaacaacaaactccttgagcttagcaagagctcatcttattcaagggactggatggaagtattgtggctggagctcagtgacagtcataggagggaatttgggttctttaattgaacaaagattagaaacttcttgtgatttttaataacagagtaatgtgttctgcttcatggtttggacagtgattctggctgcccagaagagacttgattggagagtgacgagactggaatatgggatcaacaccggttgagtggagttagtgaggggaaaaaggagatgggtttgagatatgtgtaggagatggagatgtcagggctcactgatggattggatggcttcacattccattttgcactggaccagccacgtcttaggtatctatctttagtcctgattacaggaacttaggtgtgaaatcatagggtggtagaactatgtgatagaaaaggtaggtttaactgatttgagatagaattgcttgtgatttcagttttatttctttgcaggaatgtgtccttggtctgactgacaggtgtcgctttttcatcaatgacattgaggtatcaaggcttggtttggtgttggatccttttcacagtgttagctccgagtaatctagctagctttcacccatgcctctctggccttctcttgcaggttgcgtcaaatatcacgtcatttgcagtatatgatgagtttttattgttgacaacccattcccatacctgccagtgtttttgcctgagggatgcttcatttaaaagtaagttttcaatgtataaaacagaaatggtcccttctccaatgtcttttggagtcttgatgactttttgaattcttcatttattttggctttttatcaaggagtcctaggctggagaaaatctttagagttattttacttagaccctaatctcaacataatatctcagttaaatcattctgcactttagtaaagacatccaaggaagggagttccttccttaagcagcacattctaaagttaaaaacttttcaggaaattttattatgtaactgatctaatattttatttggaattactatgtagatccccaatgttttaccttctgtgtagtcttttcccactgtgcccaccctccactgtacatctgcgctccatctagtggtttgtaggatattggctgcattttgtcttctgttccatgccctatctatctctgtgtgtgtggcgtgtatgtgtgtgtggcgtgtatgtgtgtgtggcgtgtatgtgtgtgtggcgtgtatgtgtgtgtggcgtgtatgtgtgtgtggcgtgtatgtgtgtgtggcgtgtatgtgtgtgtggcgtgtatgtgtgtgtggcgtgtatgtgtgtgtggcgtgtatgtgtgtgtggcgtgtatgtgtgtgtggcgtgtatgtgtgtgtggcgtgtatgtgtgtgtgtgttccttattctaaaaagccaacttattttctttgcttccaacttggaaatagggaatctttctttcattgatatgattatagtacactgataatgctaagaaatagagaagttgccccaattcttaactgtgtttctccacatcatttgagaagctgtgtatgtgaatgtgcatgagggctctgtaagagagagggcaagttccagggatgagcgtgttcatcagcagggctgatagtcttgaggttcagtgggagagctaaggcacatggttgttatttgttctcttctatttcacataatgtgtgcggtttcaattgcagttaatggagagtggcttgttgtgataattaaggcttattagttaatggtgtgtttagcattacaggccggcctgagcagcaatcatgtgtcccatggggaagttctgcggaaagtggagaggggttcacggattgtcactgttgtgccccaggacacaaagcttgtattacaggtaagctggtttttcagacaagatagatagtctgattgtcattcagccaagtaccaagcataattcttgcaggttgtattttaggctttcttattctttgtatcgtttattgtaaacctttccttgatagttttctgttagctttattcaaaggagtgttgatacaggctgtgaccataaggctcaaagcgaaacttttcttgaaagtcaagataaatatagagaacaacaagattctgctaaaagtgtgctgattttagagagttgtggtaattctctgtgaagagttaggtaaaatggtgtatcctggctatttaaatgttttctacttaattaaaaatgttactgctttaatttatttaagatgccaaggggaaacttagaagttgttcatcatcgagccctggttttagctcagattcggaagtggttggacaagtaagtgccattgtactgtttgcgactagttagcttgtgatttatgtgtgaagacaataagtattttattacaatttcgagaacttaaaattatgaaaagccctcattacctatatcatcaatcagattcttagaggctcttttttttttttttaacttttttactttaatgcagtattttgtagtggagattcctagcagaaagaatcgtgacactcatcatataaaggagggcttctcttaacctgagggaacacatgtgggttttaggtggcctgtgaacccagggagattgtacacaccaaaccttgtctttgtgtatttattcaagtagaaagcccacagctttcaatagatttacagcggggcctatgacccagaaaagcctgagctactcttgtgaaggaaatgactgattttctgaacctatttggaggaaactttgtattggaaagatctatactaatgttttgtttaaaaagtagacctgaattccatgatgattttctttgttttttttttgagacagagtcttgctctgtcacccaggctggagtacagtggcgcaatctcggcttactgcaacctctgccttctgggttcaagcaatcctcccacttcagcctcccgcatagctaggattacaggtgtgcaccacgcctggctaatttttttttttgtattttcagtagagacagggtttcaccatgttggccaggctggtctcaaactcctgacctcaagtgttctgcccacctcggcctcccaaagtgctaggattacaggtgtgaaccaccgtgcccgggcttctgtaatgattttctgttgtatgtatgtgaagatgtagttctcagacagtcatgatgactaaattacaccttttaagaaggtaaatgaatgtggtacctgatttttttattctgtaatttcagagtagaaatccagtgatagcagcttggcattggggctgtaatctgattataactggtttgtatcataatgaaaatatgctgggcccatggagctcagtttttgtgaatatcttttctattctttctctgtcttctcacagacttatgtttaaagaggcatttgaatgcatgagaaagctgagaatcaatctcaatctgatttatgatcataaccctaaggtaactttctaagctgtcatttactctagcttactttgtacttaaactaatatgatctgaacgaagatgttttgtcctttttttggtaggtgtttcttggaaatgtggaaaccttcattaaacagatagattctgtgaatcatattaacttgttttttacagaattgaagtaagtattttgaataattcatgtgtatcttttccatagttttctctcttcttgttaaggaaatcaagcataaatagctagagaagaaaaattccttactgttcatttttaaaaattgctataactcttagatgccagttggttttttgctcttttccgttctttttaaaacagcctgtttaaaactatgtccttaaaacatgtcattcagaattattatttcacttgatttttaggtatacatataaaactacttgtttttcctaggagactgaaatcaaatggcatctttctctctgatgatctttcccctcaactttttaatgaaacactttcaaaatagagaaaagttgagagaattgtccagtaagcaacctatatataccccacctggattcgccagtttatatttttctgtatacacattctcattctctataatctgtccatccatcattcatcttgtttgtagacaaattgctaagtgagttgtagacatcagtccactctaccacctgtacttctccttgtatatcattaactagagggcattctttgtgtatgggttggttttgttgtgttttttcaggtcatatttatctacagtgaaatgtccaaatcttaagtgtgccacttagtgagttttggcaaatgtacacttcatgtaacctgaacctctgtcaagttagagggcatttactccttttcagaaagctgcttcagattcctttcaatcagtccctgtcccattccccaggcaactactcttctgaattttttaccataaatcagttttgcctgttcaagaacttcacctaaatggaagcatacagtattactcttctgcataaagctgttttcattcagcatattgtcttgagattcatctgtgtttttatatgtatcactagttcattctttttttattggtcagtagtatgccgttgtgtaaatacaccactatttgcttattcattcccctgttgctggacatgtggattgtactaccctgtttggggctaatgtgactaaaacatctacaaacatttgtataagtcttttgtggacatgttttatttctcaatatttttataattcaactcttttccaaaagtcatttttatttatcatcatcagcatgccaggtgtatgttagtaatttgatcgctgggctacatgttctgttgatgaccattccatacacacctgttcttagagaagaagatgtcacgaagaccatgtaccctgcaccagttaccagcagtgtctacctgtccagggatcctgacgggaataaaatagaccttgtctgcgatgctatgagagcagtcatggagagcataaatcctcataagtatgtatgctgtcaccaggtggcatcctttgaaaaaccgaagtgtgtagttgtccttgtccagcctacttacctttctcattctggtgttcttcacttattacctcagatactgcctatccatacttacatctcatgtaaagaagacaaccccagaactggaaattgtactgcaaaaagtacacgagcttcaaggtagagatccgctcacagagaaagtgcttaaggtggccgtgactgctactagtcttctgcaggtgacaatcaccatgtcattgccacaccacagatttaacatgtgactttttagttgccattttaagacccttgtcagtttttttcagtgctgccctctaaagcatatataaaagtatcagaagtatatattcttctgatgtccagttctattgagaaaaatttattgtctttttggttatgttgttaggtctgtggattttttccccaaatgattgtgttctgttttgttttctaaacactgttaggaaatgctccctctgatcctgatgctgtgagtgctgaagaggccttgaaatatttgctgcatctggtagatgttaatgaattatatgatcattctcttggcacctatgactttgatttggtcctcatggtagctgagaagtcacagaaggtatgtggagttcttacttttatgccatttggttcttgtttatataatgatagtgtgaaaccctgcttctggtagtgcagtagcttttctgctatcactctgtgagtgcagggctggagacagatctgtgagtttctagggcccacattcctaagcccctgtgcttatgaaagtgttttgattgtgaggttgaagaagtgaagtaaaattgcatggcttttttttgtttctttttttttgagacggagtctcactcagtcgcccaggctggagtgcagtggtgcgatctcggcttactgcaagttccacctcccgtgttcacgccattctcctgcctcagcctctctagtagctgggactacaggtgcccatcaccacgcccggctaattttttgtatttttagtagagacagggtttcactgtgttagccaggatggtctccatctcctgacctcgtgatccgcctacctcagtctcccaaagtgctggaattacaggtgtgggccaccatgtgcggcctaaaattacatggttatttttaagatgatgggcatatgtgtgagctaatttcttctcttataaaggaaatgtaacaagtggttcatgttccactccggttctttctcacatggctcttttttctagtggagggtgggcacatggagcacagaaggctcatggcctcctttcctatgttggtacatttgctatgatcaaaaactttgaacaccactggtatgcatattttttatttatttttttgcagcctcagtctcttccccatgacctctccaaaaatgaaaatcggatccttcatctctctgcttaaaatacttcatgagctcccattgttccgaggatataattcagaagccataatactgcttaaaaacccttccttgacctggcctctgtgtatctttccattctcacttcttggtattgtctttttttcctctgcccatggaggaaagacaatgcttttgtcccccttcccttgcccctcaccaccacatgccttggtgggcagcattacttctgccatccatgggctttgactgcttccaccctcaccattcccctggctaattctcactaatctaggttaaaggatgccaaggtggcctcttcccagtaagccattcatgcttccctccagggactgggtgaggtgaccctcctatatgcttctgttgcacacagtgcctacccctgcagactacagtgtgtctttatctagagtgcggtatttatttatttatttttgagacaaggtcgggctctatcacccgggctggagtgcagtggcaccatcttggctcactgcaacctacgcctcctaggctcaagcaatctcacctcagcttacaggcgtgcaccaccatgcccggctaagttttgaattttttttgttgagacggggtttcgccatgttgcccaggctggtctcaaacttgtgagctgaagcaatccatctgcctcggcctcccagagtgctgggaatgagcacttaattatttgttgtcttgggttttcttcctatgttgttcttacatgtatttatcctgtcagcccagggaaattgcattaaaaacaggaaacacctctccattaggaagaaaaacaatttgcttacagggcatggcatagagctggagatgatagtgccaataaatactaggttggcagggtctcagagttttgtgtccaactcagtataattttatgtttgttttaatgtgatcatttcaggagagcatggaatgtcatgaaaacagcaccaagagcaatgtcttagacttttaggagaaacttagatgcatttgttgaatatcttctagactgaaaccttatttcccttattagcctatgaaataaatgatactgtgagacttagttaaggaagttactattattccaagtgtaacttattaatatccgtatgtgaaagcatttttgccaaagcttgtttgatgttcagctgacccttgcacaacgtgagtttcaactgtgcgagtttgaactgtgtgggtttatctaaatgtggatctctctcaaacacagttggccctttgtgtccacggcttctgcatccacaatcagtgtggatcaaaagtacaatatttgcaggatttgaaacttgcagatacagagggccaacattttgtgtatccaggctccatggggtcaaatgtaggactggggtatgcttggattttggtatccttggggtgtcctggaaccaattccccatagatactgggggacaactgtagtttgattttatatattatataatatgcagttaatatataatacacatttaaaaattatgtagctttgggtttattgctatatgtaaatgctagtttctattcctatatatgaatatcacaagtaataaagttctcattaatcatttttttaggatcccaaagaatatcttccatttcttaatacacttaagaaaatggaaactaattatcagcggtttactatagacaaatacttgaaacgatatgaaaaagccattggccacctcagcaaatgtggtaagtgtggggattagtatgtttatctctacttcagatcttctttggaactaggcaaggtataaattaaactgttagtttagacagtgactgatttcacttcccactcctgaaaactctaacaattatgtatgctcacgttattttgtcctgtgttctgaaaagctgaaggtaatcacttttaatgaactggaggagctccctaggtaagaacgtcaagtagatccttttttggttaagaatgagcacctgtgaagttaacttcagtgtctcagaatcaaaattggttgtcagttcttccttctcatgctgtttgcagacatgtcagggaaactctgcttgtctggagagagtgatgaggccacctccccgtgccctgcaagacgcagttttaattgacagtgatggggtgccagttgttcttcccatgctggaacagttgtgattctttactgaggactgatgggggaaaggaagaatcacctggggtgcatgttaagccttcagctgctggcatccttggagaatctgattcaggtggtctgggataggactgaggcgtgcatgtgtctaataagcttcccaggtgatgtcttttcaaggaggctgagaaaacactgggctggaaagctgggactcttaagtaggatgctgatcccaatcagtgctgctcttgcctcagaatctgcagtggtgctcattaaaaattcaaattccaggatcccattcttcagattctctgattatttaggtcttaaaaagttcctcatttattttgtttggtgaccattggtataaatgaagtccattatgcttcccatgtcttaagcctgtctttgtgtgaatctttttcctgcaggacctgagtacttcccagaatgcttaaacttgataaaagataaaaacttgtataacgaagctctgaagttatattcaccaagctcacaacagtaccaggtatgtggtatgtgaaaatgaggctctcctggttttgctttttgctttagtaggaaaggagtgaggatcctaagttcataacaccatccttggcttcaaaatttatcttaaaactaattagcctcaatttgaacttcttatctgggagaatggtcctgacctgttctctgattcctcatctggaataccacagcaccttcctcgtggggttccctgcttctttcccacccctcctctagcccaaccttactgctgtaagtctgattatcctaacaagtacagatctttcccatatatttcagcataaagggaaatttttgtttgcttgaaaaagcatccctttagctttttttatataccacacactttgcttctaagttaaatgtgttatatgatcctcttaacagcctcatagggtgctgtacacaatttgtagatgaggaagcaacttgcctgaggatccagagctacaaagtgctggacctgggatacagagcccaggctgcctgaccaccctgcccatgccattaaccaccactctaccatgccaccagcatcaccattttcagtttgtcctcagacaatatacacatctttctttgatcaagcccctgccagcttctttagcaccagcttctgccactgtccacattcccagttacttgtaggtagttctacagatgtcacatcgtgtgattcctctgtcatttctctacccaccagccttcctttagccccatttgtccatcagaacccttgggttactcctgaatgccattcctggaccaggcgccaaacactgagcccccagagcagcctgccctcgccttggtgattgcatttgtcaaactgctgattagctggtttgtcgcctccaccaggctgtgggctccttaagggcagggactccatgttgtattcctctctgaatctctggctaacatccagcctggagaatcgaggatttggccagtggctacctctttgcccttgttttctgttctcttccacactctctctgctctagtcacactggccgtcctgttactcctcagacctgctatacacattcctgctgcatggccatggtgccttctctgccctctgcctggtgccccctatctcatcacgtggtttattctcctgacagccattagagctcacactccctgagagctgcaaggagactgtcctctgtccctttactcacgtttgccattatgctatagactatattttgtccctaagtccatcctctgttactataagagcagcaacttggtggtggttcttatatggtttttcatttgtttggttttattttttgccttgctgtagtatccatactgcccagaatggtgcatatgtagttaagagtaattatttgttgagtgaataaatggcacatcctcagtaaggttttgaatgaaaaaatgactgtactaactgatcaactgtaagattttcccaggtaattctttcaagggagttccaagtataggaactaaggcagctacactggagctttagagaaatgattgtcatatttcctcctcagtcctaaatctcctcttgtcacaggatatcagcattgcttatggggagcacctgatgcaggagcacatgtatgagccagcggggctcatgtttgcccgttgcggtgcccacgagaaagctctctcagcctttctgacatgtggcaactggaagcaagccctctgtgtggcagcccagcttaactttaccaaagaccagctggtgggcctcggcagaactctggcaggtaagtacaatcatttatatgtttacatctacaaaggttttaaaaaatttatttcttttgtttggtaattttgcaaataaatttagggcagaatactctgagacagtcttgttctcactgataaaaattaatttagaatgctttaaaggataagctactacagcaagagtcccagaatgcagtggcccaatatggaaagaagtttatttctctctcccatagggatttataggcccttccgttgtgtggctctgcaaccttttaggcagatggttgtagctgggttatctccacagctgtggggaaggaaggagagtggggagaagttagaatcatggtaaaacatttacctttaagttggaaatgacctggatggaagttaaactatcaccttctattccatctcggccacgccatgtagctggatgggctgtgccctgtaagaaggtaaagatgaatttttggatgggtccattctgttatagacagtaggttgttggaatagccaggaatgaggtggggaaaataaaaggccaaatgtcgaagcattctgaaagcaaaggcagtttagctgcgtcagggacaagggttgcccgaaccagaggcgaggctggtaccaggggctctagtaccagagtggaggaaagggtaaggacacctatgaaaagagatgagcagaagctctggtcatctcagcagtgcttgaagtaaagcaatgactggtatatttttttccctaacttgtaaatattgttgagatctcaaagaaaaaaataaaaagcagtcctaaaaaaattccaaactctatcctgttaaattttgttaaatttatgtaccagtccttctttgtcatttgcagtattctttttttcttgggattataccagtgtatgggattatcacttttctttttctggttattagcctttcccaaatccctccgtttccatgctggcctctttttacaaatgtcgagaattccttatttcaggccttttagttattcgttcggtctccattgttcctttctgctttagaaatttatgatattggttgtttataccttctatctctgttcttggatctcttctattctttacagctcttagcttgctatttcccatgtcttatgagggagtatttctagtttttctcagatgtttagcaaaagtaggtggggagggcagtggtcaaagatgtttgagaaatgttacacactggagtcactctgtgtgtacatttaacgtaggcagtttacacaagagagcaaaagaaaggtaactatttaaatagtggaggtgattttacctactttttttagtgatatatgcactggagtgagcatgcaatgagagaccggaatctaccagctccttcgaaagccttgggttctctgtgcctctcattgtggtttatctcaattgggctgagagtgattctaggatctaaagacactgcatgactcaaacataagtcagctacctccatctagtgctcaaccaaagaaatagtggtctcttactgttaagggacgaagtggtttagtgagagataccaggtcattttcccatatacatgctttggaagcatctttcaaggctaattttggctgtatatgattttcaattcctgtgctaaatttagattctagctgccatttaagataggactctgtggtgtatatacctattccctcacagaaattcagaaagtacatagtttcatacataataaagacatattaaagaagcacttgagctaaagtatctgtttaactttgtagtcaactgctgcttattgtctctacaggaaagctggttgagcagaggaagcacattgatgcggccatggttttggaagagtgtgcccaggtaaactcaattcctcccttctaaaccccccagtcagcaagaaaggtcttctcaattgtatcttagtgatcatgaaagttaaaggaactgtgcataattgttaagtccagagatagtgtttgccccagaggtcttatcttgctggcttgacttggaaatctaaatttagtacatctctaagtttggtgaggtagaatatgaaggtgctctactttaacataccactggtttgaccttggtagaaagtacttaattacatctcaaggtagctgtgctttttaaaattgagtttgccaaagtagaaacaatgagaaaggaccattataaaacaggatcattgaaggctacatactcttggcttttactctcattctccctattggaaatgtctcttttacctcagggacctggaggtacagcagattataaggataagtacccatatgagcatttggtagtattataggatttattatgaaaataataaaactgcagtaacactggccacagactaacagtacacaggtgcacagttgacaccagggattattgccttgtagagttttgacctttgatgagagagtgttttttacagttgttactgatagcacatttatgtaacttaattgtgctttaaaaatatttaattgtctcttgtgtaataacagtaagtgaaagacgataactaaaattttatataattagatcctggagagaatatttgttgggtgattgaattgaaaataccagtgaatgaaacatacctaaaagggtagataggttgggttggaaagatataccacatcgagggttaattaaatggataagatgtcattatctttttttctttgtaaaggaagattaatgcataaaattattttgtgtaatttacatacaataaaattatgtgttgtacagttgtataatttacatataataaagctaattcaccaattttagatgaagaattcagtacatttggacatatgtttgtagctgtgtaaccaccattgcactcatgatctagaacatttctaacacccccaaaagttccctacttccccttttgcagtcagccttctccctccactgccagcctttggcaaactgatcagtcagtaaagtttcacattatctagaatttcatataaacagaaccatatggtatgtagtctttttaatctggctcctttcactcacatagtgcattggagatgcatccatgttgtagtttattcctttgtattgctgaatagtatcccattatatgtatatgtcagaatttgttgatttaccagttgatgtacatttggattgttttcagtttggggttattatgaataacgcagccatgaacattctagtgcaggtctttatggggacaggagtaggaatgccacatcccgtggtaagtggatgtttaactttttaggaagctgcagaactaatctgcagtggccgtatcattttgcattcccctcagtgatatgtgagagtgcttcagtgactcctatactcaccaacactgggtgtattactgtgacactagatgtattatctattgctacgtaacaacttaccttaaaagctggcagcttaaaacaacagaccctattatcccactttttcaatgggccaagaatcttggctgggcttagctggggcctctggctcagggtcctttacaaggctgcaattaaggtattggccagggctagagtcatctcaaggcttgactagtttttaatttcattttctaatgttttattactagtatatagaaatatagctgaagtgttttgcagggaggctgtataattgaccttgtatcctgcaaccttgctaaactcatttattagttctagaagctcttgggtgtattctctaggattttctacatcaacaaacatggtttctataaatatagttttatgtctttcttacaatcaatacttttttctatctgtattgcattttctagggcttccagtgtggtgttgaatagaagtgttaagagtgaacatccttgcctttttcctgatattggagaaaattcacttgtcttttagcattaagtgtcatgtttgcttttttaaaattttattctatattattttatttttgagacagagtcttgctctgtcacccaggctggagtgcagtggtgtgatctcagctcactacaaccttgacctcctaggctcaagcgatcctcccacctcagcctcctgagtagctgggactgcaggaacatgccaccatgcctggctaatttttgtattttttgtagggatggggttttgccatgttgcccaggctggtcttgaactgttggattcaagcaattcgcctgtctcagcctcccaaagtgctgggattacaggcatgagcctccgtgcctggcctgatatttgcttttttttttttttttaatgctctctattgcagagttggcaaactacaacctgtgacaaatccagcatgccacctgtttttgtaaataaagctttattggagcatagccatgctcattagtttacatcttgtgtatggctgctttaacactacagcagcagagttagagttgtgacacagatagtttggcccataaggcctatatttactgtctaatcttttacaggaaaaatttgccaattcctgccctcttggtttgaggaaattcccttctgttccttgttctgagagtttgtatcatgaatgggtgttaaattttgtcaaatgcattttcaactatgaagggttttgtttttagacgagtgatatgggggactaggtgattgattttctactgttaaaccaaccttgcatctctgggttcaaccccacttggtattatagatttattaccctttttctcttgtggcagattagatctactaaaattttcttgaggatttttgtgtttgtgttcatgagggatattgtagttttttcgtgtctttgccatgttttgggtatcaggataatgctgctgtcattgaggggtgacaaaaatgaggggtggtgtcctttacacttctgttttctggaggatttcatgtagaattggtatgagagtctagcttatggttaaaaacctatgtgtgatgtttcagacctgaccataaacaattacagactttacctaggaggccacatggggaaaagctgccctccctacaccagacttggcgtactgccaatgcattacagtttctaaagggagttgcagtcaaggactcagggccccctgttagtcatgctcttgtaacagtatttgcattgagagtcctggcactttcattcttaggtctctctatctgaggccatgggccaaggtcttcttcaggcacctctgccaaggcctgtttatgcaagaaggagtggaaaaaccttgacatttttttccactgtgactcactacccagtacttttccacccttagcccccttcctttgcacccatacccccaagatccatcaaactgctaaagcctttttttccaagctccttcaacagtgaaccaaccctcatgtctgtgtggatccagctgactcttgactagtgagttgttccttgggaaaaaatggaacagagagagttggtgctttccctggttttagcctcttgcttataccaatgcaatgcctgaaggcttaattcatttttgacttgttgctttgatcagctactccaacacctgacagctcagctctttctcccagctcttgggagatatttttttctttaaatgtttagtagaatataccagtaaggccatctcggccaggagttttctttaatgaaagcttttccactattagttcagttactttagtagacattagcctattcaagtttatctgtgtcttctggaatgagcattggtagtttatgtctttcaagtaatttgttcatttcatctaaattgtcagatttattggtatgaagtgtttatagtattctcttattttactgtccgtagggtctatggtgatgtcctgtctttcattctagatattgatgtgtcttcttttttctgattattctggccagaggtttatcaattttattgatcttattaaagaatgaactgtttcattgtttttctctatgatttttctgtattctatatcattctttttttattattttattattttatttgctctttatttttctagtttcttaaggtgatggcttacttttatttttttcttatttttttcttttgttgttgttgtttttttaaagaaacagggtcccactcttgctcaggctggagtgcagtggcacgatcatggttcactgcagtctcaaactcctacattcaagctgtcctcccccctcagcctccagagtagttgggattacaggtgcatgccaccatgcctggctaatttttaattttttttgtagagatggggtgttactagttgcccacgctggtctgaaactcctggcctcaagtgatccctccacctctgcctcccaaagtgctgggattccatgtgtaagccactgtgcctgaccaaggtgatggcttaaagctattgatttgagatgattccttactttatagtttaagcatataatgccataattttcctcaagcaccgttttagttatgttatacaaattttgaaatgttttgttttcatttcctaatttcccttgtgatttctttattgaaccttggcttatttagaagtatgtttaacttgcagatattggagatttgccagccatctttttgttattaatttctactttaattttgttgtgattagagaacatacattttattaatttaaatttataatttattttaatttataatatggtctgttttacagaatgttgtgtgtgtatttgaaaataatatgaaagctactattattggatggagtgttctataaatgtcagttagattaggttgatcatgctgttctagctttttatatccttattgatttcctcactacttgctctatcaatgactgggaaagtgttgaagtctcccagtatttgtctatttctcctttgattctaccagtgtttgcttaatgtattttgaagctctgttataggtgcatacatgtttatgagtatgttatagatgtattcattttgatatccttctttctctgttactattcctaattctgaatttgactttaatgttattaatataattcttccagctttctcttggttagtcttttcattgcatatctttttctatccttttacttttaatctagctgaatgtagtctttattttgaaagtgcgttccttgttgatagcattattggttcttttttttttttaaatctaatttgacaatctctgtcttttaattggagggtttagacatttgcattgaatgtgattaccaatatagttagatttaaacctacagtcttgctgtttgctttttgtttgtttcattgatcctttgtttcttgtttttttctttttttgctttcctttggatttagtatttttcataattccattttacctccactgttggcttattagctatacttcttcatttcagtattttagtggttgctgtaggatttataataaatatcattaactgaccatatcttcagataatcgtatactacttcatatatagtgtaaaaaccttacaagagtattcactccataatactttgttattgcttttgctttaagtgatcaatgattgtttaaggaaattttttaatgacctttcatgtttattctttttttttttttccaaaagattcagtattttccgagttttcaaaaactgctggccactcaaagtggatcaacaaaaatttaagagctaaaactgtaaaactcttgaaggctgggcacagaggttcatgcctgtgattccagcactttgagaagctgaggtgggacaatcacttgagcccaggggtttgagaccagcctgggtaacatagaaagaccttgtttctacaaaaaataaaaacacaattagccaggcatggcggtgtgcacctgtagtcccaacttcttgggaggccaaggtggcaggatttcctgagcctgtaagtttgagactgcagtgagctgagttcacgccactgcacttcagcctggacaacagaacaagaccctgtctcaaaaccagaacgaaactataaaactcttagaagaaaacagggctaaatcttcatgactttggatttggcaatggatggttagaattaataccaaaaacacaatcaataaattgataaattggatttaataaaaattaagaacttttgtgtatcaaggacattgtcaagaatgtgaaaagacagcatatagaatggaagaagatatttgcaaatcctatatctgataaaggtttaatatccagaatatgtaaggaactcctgcagctcaacaacagaaagccagttaaatcaattttgaaatgagcaaacgcctgtaaacccagctgcttggcagattgagacaggaggattgcttgaggctaggagttcaagaccaacctggacaacatagtgagaccctgtctaaaaacatttttttaattagctgggtgtggtggcatattcctgtagtcccagctacatgggagaccgaggcaggaggatcacttggggccaggcagtcaaggctgccgtgagctgtgattatgccactgcatcccagcctgggcgacagagtgagaccctgtctgagaaaaaaaaaaaaaaaagaacaaaaaaaaatttagaagattgctattctagtctactattttttcaaagggtggtcttgttaacaattctggagcccacctaaacctgctaaatcaaacttggtagtaaagctggggagatgggcatgtctaacagacgtttctggtggttttgatgtccaggcgtgcagagagatgatgcttaccttgtgttttgtcattattttcaggatttacaccccttccttgtcttttgtatcaatatttatggagtcatgaactctaggataggcatgatgttgagaactaggagttctcccctggccagggagatagaggcaggtctgtggttagttttgtagttggctgtgatgacatctgacatgctctcttcacttgttgtcttcttcctgttcccttgtcaggattatgaagaagctgtgctcttgctgttagaaggagctgcctgggaagaagctttgaggctggtaagaatcttgtaaatcctctggatgttgggtgctaagcagagagagcaagcaagggattccaggtcagttggaatctcttgtcttctgaggttcatgaaataagtagaaataggtcaggttcctggcttaaggaaaagcggtgtttttaaaatcatttttatcattcttgataataatttgaaatattactgtcttttactgaaatgaattgaatttccttggctgccttgtaggaggcctgtttttcaggaaaatattctgattacctctgaaagtaatccatgtctttctaagtatcttaactctccagtgactagaagttttccttcctaaaattattgtgtttttccttctaggtatacaaatataacagactggatattatagaaaccaacgtaaagccttccattttagaaggtgagggttccattttagatagaattcctcatttggaagaaggtgaggagagagagatgagagagtctcctcctatttactgtgttttcttaataatatgtcatgtagactcaatcaaaattaccacctggatataatatttaattctcactagaatttttaaatatgctgaactattaaatggtaacaaaatatttaaatgttagaaacctgtgatcaaatatgattaagaatctttgtatttggaaatagtaaacttgaatatgaactatattagataataatataacactgataaatttctggcatttaataatcatgttgtggttatataagataatatcctattattctcaagagataaatgctgaaatatttaggaatgaaggatcatatctctgccttactcttaaaaggttccacaaaagtattaatgaatgtgtgtatgcatgcagagaaacaggaagcaaaaaaatgtcaaaatgttagtaattggtaaatcaaagtaaagggtatatgtgtgttcattgaactcttacaacttttatgtaggtttcaacgtttcaaagtattttttaaaagttaccttttcaaatgaagtttgtggttcttagagaacatatgaatattaccagttctagaatactcagatggtcactgtgacctcttaaaagcaaagtggagaaggacatcagtttgacttatagaaaccttagggagtggttgattttaagttctgcatttttatgcacatctaccctgtaagtaacgtctggcctttctgacatttacatgtatgcacattcttaccttgtctgcacccccttcctccatcctaattaaaacgttgctggggtactttttatgtcattcactttaggtacctctaactgggtactgaaaacatcattcctcatctataataatctaaccagctcttacttagattttcaccactaatgagaacctttcttagataaatgccgataattcatctacataggcccaaaacctattaataaaatgcatccttggatagtagtattttgcttttttaaaatgtattctactagtgttatttttctcttgtgtatttttccattggacaatatttattagatacattttttccacatccatgggcattttgatggatgtttagccagaaacatttaggtaattttcttcttatttttgttaactgagctcccctcccctaccccccctttttttgtttgtttgttttgtttgtttgtttgttttgccaatcctcccttgctttaggtatcaagtcttcgttcaggtgattttacaagttcagtggtagcgcatattctgggataatgttgatgaactctaagatctggaatctcagtctctaatttgttaatgcttattaaggaaaaagagctcgcttggaaaacctagtaacctctttctttttgctgaattttaaccctccttcactgctccccgcctttagttttttctctttgcttaaacctcatgctcaaactattttccattctgcatctccagcccagaaaaattatatggcatttctggactctcagacagccacattcagtcgccacaagaaacgtttattggtagttcgagagctcaaggagcaagcccagcaggcaggtctgggtgagtatctgcgtgaaggccatcgacgtgcgggggcagtggggttgggtaacgccacacattgtctagattgcttggtgatccgcctgcaatctgattactgtgccatgggcaagtgtgaggcttctgtggagccccttcagggccctctgtgtctgtgtttgtgtgttggtgaagggcaggaccaagcatgaatggggagagctctgccagacattcccacctacccccattcacccagagcagctgaccacttccgtgtctaacaaaatgagtttcctcatttccagaaaaaagttcaggaaactactgatttacattagtaattactgtatttaatattatctcattcattttgagatcaactttgcaatcattttcatccatcctttgatatgcaccagttgactctagttagttcatttaccgccctgaaagtaaacccacacattagcaggcagtgttttcatcggcttctggttcttcttttctagatgatgaggtaccccacgggcaagagtcagacctcttctctgaaactagcagtgtcgtgagtggcagtgagatgagtggcaaatactcccatagtaactccaggatatcagcgtacgtatcacattgattcagcacattgactatatcctgggcatatagggaaagtggaagcaaatagattggttttctactgggacggtgtagtgggagtggggagaatattcttcagcgctgtgtggaagttgttcagacactttcccagcatatctgagacattaaacttggcattggaaggttttcttcctcagccttgtggcttgtgtgttttcccattccccacgaggcagttcctcccctgaatgctcagtttatattaacatctgattttattttttgaacaaatgttgtgactaaattataggcactgaaaaaatgaaaagataagcttcttcaattcaaaatcaggattggaagagaccataaatgtaaaataagtcataacacttttaccaaatatagtaatttgtcagaaatatttattcagcactcatatggtaggtgcagtagatgttaccaaaaacttataaggagatatgagttataagagtttatagtcttgcttgggatgtgtaaagcaatgcaagattatatattcaaactgaattttgctttaggaatttaaaatggagatctgtgaagttgtgtggggtcatcagcaactgcaagaaagtagccaggcaaggtagcacatgcctgtagtcctagctactcaggaggcttaaaaatatctgtgtaatttctaacaggagatcatccaagaatcgccgaaaagcggagcggaagaagcacagcctcaaagaaggcagtccgctggaggacctggccctcctggaggcactgagtgaagtggtgcagaacactgaaaacctgaaaggtatattctcagtcctgatgatgattcctgaccacaaacaatagtgaataggcagtacagacaggcagagttcagtaggtgattaagctaccattttcccaatttgaggaaagatgagaacttttagcaggaagggtcatgtctgcacacattcctgaagcagcccttcttagctggtaactgagaagccttcctccatttggcatccccctaactgaactgggagagatgcttaggccaggataaagaattgtgggacactgctttctgcgtaggccccccagcgtgcttgattttctttttgtagtacatgtgtttaattattccagcatttgggaagaaaaaagataatgtgggagaaaggacctgcagtgggatcatagaaatttttggctttggatagaagctatgtatgattctgtcaatggagctgggaatataacttaccactctttcaaatttcttctctctagatgaagtataccatattttaaaggtactctttctctttgagtttgatgaacaaggaagggaattacagaaggcctttgaagatacgctgcagttgatggaaaggtcacttccagaaatttggactcttacttaccagcagaattcagctaccccggtaagttttctcagagacggtgtgcatttttttcatcattttcatgggttattgtattcacacaatctccaagtcaaaaagttttcctgttcttaaaacataagatgccatagttaaattatcttagatttatgtgtaagctgtcagtaagatttgatatttgcctgtagagtgactagtataccttggcataggttaaatggactgtcattttcctttctggatgaagtagctgtcatggagaaaatgggaaagtcacatgattgctcctggccttcaatgaggttggagtggggagagatgggggaagatggggtcagagacggcctctcactttcctttcagaactcagggatgggatcaggctttaaagggaccccaggcaattgcttttccttttgttttatgaaaaatttgacttgtcacttctatgttgttatgatggactttgcgggttgtgtttaaggctgaatcagctttgtatcgcagaattctagtatattgtcatctgtttattatttatacctctgttcactctcttatacttcaagtctattgttaagagtttttatttggattcaaaaaggctggtgtatcagtcaagatctagaaaggaaaacaaaagcctatctattattttatcacagaatttaatatatggatttgttaaataagtattagaggactaaacaaggcaaaagggaaatacagaggaaggacattgagatagtaactgtaggaagcagctttaccctctagctgagggaacaggaggagttgttgggaattattagaatttagaagcctggaagtggggccctgtagagctggctcttgaacctctgagaggagggtgccagccagctaatcctggcatttctgagggagctggttccaagcgtacagaagtaaatggaaactggaaggaacagctgctgctgggggaaaagccagccggtcgggccaggtgtggtggtggctcacgcctgtaatcccagcactttgggaggccaaggcaggcggatcacctgaagtcaggagttcgtgactaatgtggccaacatggagaagccccgtctctactaaaaatacaaaattacccgggcatggtggcgcatgcctgtaatcccagctactcaggaggctgaggcaagagaatcgcttgaacctgggagacagaggttgtgatgagccaagatcgtgccattgtactccaacctgggcagcaagagcgaatctccgtttaaaaaaaaaaaaaaaaaagccagccaatcacggaagaaatctagaaatcttttgttcatcctccagctttgtactccccctctggtgttcactgtaggcaggacatgatgggaagccagcagcaaggaagaatatctttcaggtgcccagccccagcaccacaagcagtggatagaagggtgggttggagctgagagattacaaatcagctcagtgtttagaaacacatacgcttatcatgtcttgatttcctcatttagaaatgggcataagacttctctgtgtgcttcaatagaatgctttgaaggttaaataagagggtgtgtgtaaaagcactttacaaaccgttgaaataaaagcaactaggaatcagggccccagaacttcttgaatttattataataggtatttcttagaagaaatgtgatcatcatcttcaaaactgtagtacttttgaagataattgtttttgttttttgagacagggtctcactctgttgctcaggctggagtgcagtgatcaccgctcactgcagcatccaccgccccgggctcaggtgatcctcccacctcagcctcttgagtagctgggactacaggcgcatgccacaacacctggttaattttcaaattttctgtagagacagggtgtcaccaagttgtccccgctggtcttgaacaactcctgggctcaagtggtctgcccacctcacctctccaaagtgctgggactataggcatcagccaccatgcccggcttgaagataataatttataataccactcccatgagtgatcttctcttctgatcacatattcacattaaggtctattttattttatttttttcttgctctgtcacccaggctagagtgcagtgacagtatgatcaatcatggcttggtgcagcctcgaatgcctgggctaaagcagtcctcccaccgcagtctcctgagtaattgggaccacaggtgcacaccaccatgcccagctaattttaaaattttttcctagacatggggagagggagtcttgctgtgttgcccaagctggtcttgaactcctggcctcaagtgatcctcctgccttggcctcccaaagtgctgagattacaggtgtaagccaccatgcctcccacattaagttctaagacatcaattttatgattgtggttttgattggtgaagtatggttgtggtatgtgcaggataccgtgagtgacttctcatggcattgctcttgagagtgtgccaccaagggtctgcactaaccaggggtgtgcccagaggctcgctgcaggcttgaaattcctgcggagtcttgtgttttacctggagcacatgtgcacagtttccattctgctccatagtatgcacatgtttgtatttatttcaacctaaaaatgtttgtttcccataactctttgcgtataattgatactctacgtatttgtagcctcttttactcttttccctttcctcagggagtggtttgctcatttagaaaaggccaagatatatcactgtagagtttcgtttcttttcttttcctccaccccccatctttaccttgttctgggagaaaggagaattagaagtctgagttgcagctggagaaactggcaaattaaaatcacattgggaaagagaattactgtgtttcacaccataccagtagaaatgacaggctgttttctgggggtagggatttggcctttggtattggcagtcttgagaagtattagataatctttgctgatacagtctattttctcctcaggttctaggtcccaattctactgcaaatagtatcatggcatcttatcagcaacagaagacttcggttcctgttcttggttagtattttttctcatttaatattacaatactaagcagaaggactatctttctgtaagtattgagaagatcagcagtataaggagagattggatacaatttttcactacaaaaaattgactacaattcttcctcaattctaagaccgcatctttagtatgatcagtttcatgcttctagcggtgggggacctggtgcaggaaaatccagcatgaccattgtatgtgtaatttttaaaaatatttatgtggcatatgcttgttcataaaggcacaccacagttccagtttcagtctaaactgtctacatttacatatacatcaaaagattcttctgaagcatcattactggctattggcagttatgctttgcatcttgggggcattttcataaaccttgcttatgagtgggacctttttattatgtttaggattgacaatataatttgaaggcaaatccaaagaatattagcattttatacatatttcctgtttagttatgcatgaagtgttttatttgttgaggggagatgattctcaattagattacttatatccctaaaaattaaaaaccctaagcgctttcttttgaaagttggttagaaacatttgatgagtcagcttgggactttcagtatttgcccttacttatagttggatcaatgaagcatcttagctttgaaaagtgaatgatagtttctaaaataattggcagttttaactgctattatttgcatttctagcatgtgacaagcaactttctgaaattttttttcaccgaagtgctacactgtaatagcattttgatgacatttgaagtagcctgtggggattcaaattaagtttgactttaacagcttatgttgctaccaggaagaacagctaccttccatcccagctaaactcatacatccagactgtaactactgtattcctagctcctcttctgtctagagaatggcaaggttcttttggtatcagtttcgacatatccacttattcctttttttttcttaagttttttcatttagaaaaaaaaacagatggggtcttaatatgttgcccaggctggtctcagcctcctggtctcaagtgatcctcctgcctcggcctcccaaagtgctgggattacaggcgtctgcccctgtgcccagcccacttatttcccagatgctaggaacttacattagacctgaggccatttggtcattgtttattttgtgctgtagtccaatccagttgtgatttctgcctcctgtgttcctcgttgctggcctgatgctgaccttcaggttaggtcagtcccatcattccccagggtattctagatggctttcccacttcaaagagcactttcttgttttccagctgagccttaaagacactctgtaatatttgagagcccctcattatctgagtgtttattatcattacccttgtggtttcaaggatgtataggaaaaggtaagttcctataattcaaaaattgccactgatgaactaatcacaaaattagtgccactcaaatattactcagctgcccctccccagctaacaatagttaagtatattggcacatccccacaagtgaaatcaatgacttgatgggtcatttctgattgtttcctgctttgatgcaatacaatatcatgcagatcaattgcaagtcttgcaaaaatttagtattacataaaatagattaaaatgatattggaaaagtacttgaatcacagctgggttggacttgttgcaattgatgacaaaataagtgcttcaaatgattttgactatcaaaggattgagagaggtccttagaaaaattgaaaagccctcaagttatttttataaaaatggccttttttgtgtgctgtgaaatccacatatggaaatgtgaaatatgtcatgtcctgctgtcatataatttgtcagaataattactttcttgcccaaaagtctgtactttgtgtttatttcaagttaagtctagaatcaaatatagttgtagttatgcctaattttaaaaaatgagatagagcacattatttttgtaactagtttttttttttttttttttttttttttttttttttcagacagagtcttgctctgtggcccaggcgggagtgcagtggcgcaatctcggctcactgcaagctccgcctcccgggttcacgccattctcctgcctcaccctcctgagtagctgggactacaggcgcccgccatcacgcccggctaatttttttgtatttttagtagagacggggtttcaccgtgttagccaggatggtctcgatctcctgacctcgtgatccacccgcctcggcctcccaaagtgctgggattacaagcgtgagccaccgcgcccggcctgtaactagtttttttaagataaagtcttattccaactttaattggaatttatgaaataccttgttgatagtgaatttatttaagtagccttttttcagtattgatattcttatatctttatggcaccatttagtggagagaaatgtaaacaaacataaagatgtagtattaaatcataactgcataaaattaactgtagtatgtactgcactactgtaataattttgtagctacctcctgttgctattgtggtgagtgagctcaagtgttaccaatatctgcttaaaatgccatgtgccgctaaccatctccacatgagcagcacatgagagtctccattaattgcatatggcagcgaaaagtgatctcttgcattgtcgtgtattttttatcacgtttaatgtaatatcgtaaaccttaaataacaccatgagacctataggaagtaccacaagtgttgctcccaggaagcagagaaaagtcataacattacaagaaaaagttgacttgctcgatatgtactatagattgaggtctgcagctgtagttgcccaccacttcaagataaatgaacccagtgcaaggactattataaaagaaaaggaaatttatgaagctgtcactgcagttatgccagcaggcatgaaaaccttgtactttttgcaaaatacctttttatgttgtattgaagatgcagcttttatgtgggtgcaggattgctatgagaaaggcatacctatacaactattatgatttgagaaaaagcacagtcattgtatgagaacttaaagcaaaaagatgaaggatcaaagctggagaatttaatgccagcaaaggatggtttgataattttagaaagaggtttggctttgtaaatgtctggataataggaaaagcagctcctgccatccaggaggcagcagcaaaggcagtcaggtttatgatcaggactgcccttatctgtaaagctgctaacccccgagcctggaagggaaaagattaacaccagctgccaggcttttggttgtaccatacaacaagaaggcttggacaaggagaacactttttctggattggttccattgtcgatttgtccctgaagttaagtagtatcttgccagtaaggggactgccttttaaagttcttttgatactggagaatgcccgaggccaccccaaactccatgagttcaacaccgaagacattgaagtgatctacttgcccccaaacacacatctctaattcagcctctagatcagggtgtcataaggacctttaaggctcgttacaaacagtactctatagaaaggattgtcaaatgtatggaaaagaaccttgacagaacatgaaagtctgaaagaattacaccatcaatgatgccatcattgttatagaaaaagctgtgaaagccatcaagcccaggacaataaattcctgctagagaaaactgtgtccagatgtgcatgacttcacaggctttacgacagccaatcaaggaaatcatgaaaaagattgtggatctggcacaaaaaaaaaaaaaaaaaaaaaaaatggtgcatgaaggatttcaagataggaatcttggagaaattcaagaggtgatagacatcacaccggaggaattaacagaagatgacttgatggagatgagtacttccaaaccagcgccagacaatgaggaagattacataaaagaagcagtgccagaaaataaattgacatttgttccaaaggttccaattattcaagactgcctttggcttcttttacaacatggatgattctatgttatgggcactgaaactaaaagaaactgtggaaggattggtaccttagagaaatgaaaaagcaaaaacatcagaaattatggtgtatttctgtaaagttagtgacactgagtgtgcccacctctcttgcctcctctttaacctcccctacctgtttcatctctaccacccctgagacagcaagaccaacccctccacttcctcctctacttcagcctactcaacgtggagatgacaaagatgaagacctttatgatgatccacttccatttaatgaatagtaaatattgttttctttatgattttcttaatattttcttttctctagcttactttattgtaggaatgtagtatataatacatataacatacaaaacatttgttaactgactttttatgctgccaatacactgccgaacaacagtaagctattggtacttgagttttggagattcagaagttaaacatggggccaggtgtggtggctcacacctgtaatcccagcactttgggaggctgaggtgggtggaacgagaccaggagttttgagagtagcctgggcagcatggtgaaaccttgtctctacagaaattagccaggtatggtggtgtacacttgtagtcccagctacttgggaggctgaggcaggagaatcgcttgaacccagggggtcgaggctgcagtgagtcatgatcgtgccactgcactccaacctgggcaacaaaatgagaccctgtctcaaaaaaagaaaaaaaaaaggtatatgcagatttttgactgtgcaggggggtccgcacccataaccctacattcaaggatcaactgtaatttttcatgcctgcatggctcatatgtacagatttactgctggaagtttatcataaataatgctgaaaaagaaaatccttatatatacatattttctcctatctctgcttgcagtatatgattcctggttagaaaagaaacttaacaaatctaagtgaaagagtgcctgggagttttaggttacaatgacagaatcttttcctaaccctctctctccattcactttttttaaagcaggggcatctttattgatcaacatgtttgtcgaagtttcatcataaagtagttcctgtccattaacttcacttactgaatatgtgctatcacattttgctattccttaaaaattgagctagactttacatatagtgaaatgcagagatttcaggtgtacaatttgatgagttttaataaatgtatacagccatgtgactgctgccaccacccctcccaccagtttgaaatacagaacattcttccactttgaatcactgggtgagcatgcctgaggttgaaatgcagtccctcctctcagggcggggcctccaggttgtgtttgctctgacctggaggttgcaggggtagcagacacatgaactctggctctgatggtcttattgctgcaaactccacctgcctagtttgtttagtttagagttactgcctcagcgccctccaacaagagtatgtctgtcacaatttcccttcctttcttgcttttagatgctgagctttttataccaccaaagatcaacagaagaacccagtggaagctgagcctgctagactgagtgactgcagttaggagggatccgacagagaagaccatttccactcattcctgttgtcctaccaccccttgctctttgagggctggctattgagaactggaaagagtaaaatgataacttaccttagcattgccaagaacttcagcagacaacaagcaattctatttattttatgttgtgtatacatcttgatcattagcaagacattaagctttaaccattatggcaccattttgtgagaatgattgttctttcacttgggctgtttgagagcataattatggtaatcatgagattaatgtttcatgatttctacctccaaagtgtgaagacaagtaaaacaatgtttctaaattgtcttattttgttggcggagaagattacaatggctattagtgctacatttggtcaaatgtaatcacttaaatagcttcttgtcaccttaaactaaagcagaataaaaagtatcctttgaaattataagccctcctttgctgacagctattattttgtaacatcttaccaggtcatgtgctttcagttataactgggctgagcctcctataattacaatgtctatagggactgttttactgcctgtgtattttctgctagagagttagcaatgttagagctagaacagattagaatttctaaacagtatcatgcacagttggtgtgagtgatcagtgtgcattgtatggcatgcatggttgtgaattattctctgttctccaaatactgtttctttaactcagatatttttgttagtgtctaggccacttcatttatttttcgtcatggtactttactgacttctctttattcaattctccacgccctcaccaaaaaaaactgtctcaaaatgagaatattttattttcatggtgagtctagaaaacgcccacttcattctgattaaaaattcttccatgttttaaatatcagaaccagacctttcttactgtgtatcttagcccatttgtgtctctataacaacaaccagctttcaaaggaactaatagagtgaaaactcactcattaccacgaggatggcacaagcgattcacgtaggatctgcccctgtgaccaaaacacctcccattgggccccacttccaacactggtgatcacatttcaacatgaggtttagggaaacaaatgcctaaactacagcactgtacataaactaacaggaaatgctgcttttgatcctcaaagaagtgatatagccaaaattgtaatttaagaagcctttcccagtatagcaagatgttaactatagaatcaatctaggagtattcactgtaaaattcaacttttctgtatgtttgaacattttcacaatctcataggagtttttaaaaagaagagaaagaagatatactttgctttggagaaatctactttttgacttacatgggtttgctgtaattaagtgcccaatattgaaaggctgcaagtactttgtaatcactctttggcatgggtaaataagcatggtaacttatattgaaatatagtgctcttgctttggataactgtaaagggacccatgctgatagactggaaatagaagtaaatgtgtttattgataatggtgtgaattttcctggacattcagtttccttaaataatgtattgaagcagcaagaaataatttgtttgaatgcaaattactatcaattactgtttctctcatctgagcaggattggattttgttcctttttagaagaagcaggcaggaggagaccttccaaattgaggcaaagccaagaattgaatattcatgggggaaaattgagtgtatgagaaaaggaggaaactcctctgagtgatgaatgcttaatttgggggaaagagtctgtcaagttttagaaaagagtacataaatttggatcctgtcccaaagcaagttcatgctgcaataagctaaaaccttcacttttcttggttccattgagtcagatagctttgctcagatgctctaaacttcaagaaggaacttgcagaagactgtcttcttcggtcaaagtgcattttaaatttatgcttttgaaaaaactgaggccgggtgcggtggatcacacctgt

SEQ ID NO: 93 - RNA, 6133 nt, Homo sapiens
  source 1..6133: mol_type = mRNA
aattacagtgctttggggttcgacatcaaaacagagatcaaatacaaaagtttgggcagatgggcaagagggcagagggacaggggacgcggccaatgtagctcctctacctctacggtgccaggcctacaaagaaggccggccgccgtaagtgaccagaagcgggcccggcctcgccccctccgcctggtgacgtcactcccgcgccgcactcccagtgctgcggctgcctagttgacgcacccattgagtcgctggcttctttgcagcgcttcagcgttttcccctggagggcgcctccatccttggaggcctagtgccgtcggagagagagcgggagccgcggacagagacgcgtgcgcaattcggagccgactctgggtgcggactgtgggagctgactctgggtagccggctgcgcgtggctggggaggcgaggccggacgcacctctgtttgggggtcctcagagattaatgattcatcaagggatagttgtacttgtctcgtgggaatcacttcatcatgcgaaatctgaaattatttcggaccctggagttcagggatattcaaggtccagggaatcctcagtgcttctctctccgaactgaacaggggacggtgctcattggttcagaacatggcctgatagaagtagaccctgtctcaagagaagtgaaaaatgaagtttctttggtggcagaaggctttctcccagaggatggaagtggccgcattgttggtgttcaggacttgctggatcaggagtctgtgtgtgtggccacagcctctggagacgtcatactctgcagtctcagcacacaacagctggagtgtgttgggagtgtagccagtggtatctctgttatgagttggagtcctgaccaagagctggtgcttcttgccacaggtcaacagaccctgattatgatgacaaaagattttgagccaatcctggagcagcagatccatcaggatgattttggtgaaagcaagtttatcactgttggatggggtaggaaggagacacagttccatggatcagaaggcagacaagcagcttttcagatgcaaatgcatgagtctgctttgccctgggatgaccatagaccacaagttacctggcggggggatggacagttttttgctgtgagtgttgtttgcccagaaacaggggctcggaaggtcagagtgtggaaccgagagtttgctttgcagtcaaccagtgagcctgtggcaggactgggaccagccctggcttggaaaccctcaggcagtttgattgcatctacacaagataaacccaaccagcaggatattgtgttttttgagaaaaatggactccttcatggacactttacacttcccttccttaaagatgaggttaaggtaaatgacttgctctggaatgcagattcctctgtgcttgcagtctggctggaagaccttcagagagaagaaagctccattccgaaaacctgtgttcagctctggactgttggaaactatcactggtatctcaagcaaagtttatccttcagcacctgtgggaagagcaagattgtgtctctgatgtgggaccctgtgaccccataccggctgcatgttctctgtcagggctggcattacctcgcctatgattggcactggacgactgaccggagcgtgggagataattcaagtgacttgtccaatgtggctgtcattgatggaaacagggtgttggtgacagtcttccggcagactgtggttccgcctcccatgtgcacctaccaactgctgttcccacaccctgtgaatcaagtcacattcttagcacaccctcaaaagagtaatgaccttgctgttctagatgccagtaaccagatttctgtttataaatgtggtgattgtccaagtgctgaccctacagtgaaactgggagctgtgggtggaagtggatttaaagtttgccttagaactcctcatttggaaaagagatacaaaatccagtttgagaataatgaagatcaagatgtaaacccgctgaaactaggccttctcacttggattgaagaagacgtcttcctggctgtaagccacagtgagttcagcccccggtctgtcattcaccatttgactgcagcttcttctgagatggatgaagagcatggacagctcaatgtcagttcatctgcagcggtggatggggtcataatcagtctatgttgcaattccaagaccaagtcagtagtattacagctggctgatggccagatatttaagtacctttgggagtcaccttctctggctattaaaccatggaagaactctggtggatttcctgttcggtttccttatccatgcacccagaccgaattggccatgattggagaagaggaatgtgtccttggtctgactgacaggtgtcgctttttcatcaatgacattgaggttgcgtcaaatatcacgtcatttgcagtatatgatgagtttttattgttgacaacccattcccatacctgccagtgtttttgcctgagggatgcttcatttaaaacattacaggccggcctgagcagcaatcatgtgtcccatggggaagttctgcggaaagtggagaggggttcacggattgtcactgttgtgccccaggacacaaagcttgtattacagatgccaaggggaaacttagaagttgttcatcatcgagccctggttttagctcagattcggaagtggttggacaaacttatgtttaaagaggcatttgaatgcatgagaaagctgagaatcaatctcaatctgatttatgatcataaccctaaggtgtttcttggaaatgtggaaaccttcattaaacagatagattctgtgaatcatattaacttgttttttacagaattgaaagaagaagatgtcacgaagaccatgtaccctgcaccagttaccagcagtgtctacctgtccagggatcctgacgggaataaaatagaccttgtctgcgatgctatgagagcagtcatggagagcataaatcctcataaatactgcctatccatacttacatctcatgtaaagaagacaaccccagaactggaaattgtactgcaaaaagtacacgagcttcaaggaaatgctccctctgatcctgatgctgtgagtgctgaagaggccttgaaatatttgctgcatctggtagatgttaatgaattatatgatcattctcttggcacctatgactttgatttggtcctcatggtagctgagaagtcacagaaggatcccaaagaatatcttccatttcttaatacacttaagaaaatggaaactaattatcagcggtttactatagacaaatacttgaaacgatatgaaaaagccattggccacctcagcaaatgtggacctgagtacttcccagaatgcttaaacttgataaaagataaaaacttgtataacgaagctctgaagttatattcaccaagctcacaacagtaccaggatatcagcattgcttatggggagcacctgatgcaggagcacatgtatgagccagcggggctcatgtttgcccgttgcggtgcccacgagaaagctctctcagcctttctgacatgtggcaactggaagcaagccctctgtgtggcagcccagcttaactttaccaaagaccagctggtgggcctcggcagaactctggcaggaaagctggttgagcagaggaagcacattgatgcggccatggttttggaagagtgtgcccaggattatgaagaagctgtgctcttgctgttagaaggagctgcctgggaagaagctttgaggctggtatacaaatataacagactggatattatagaaaccaacgtaaagccttccattttagaagcccagaaaaattatatggcatttctggactctcagacagccacattcagtcgccacaagaaacgtttattggtagttcgagagctcaaggagcaagcccagcaggcaggtctggatgatgaggtaccccacgggcaagagtcagacctcttctctgaaactagcagtgtcgtgagtggcagtgagatgagtggcaaatactcccatagtaactccaggatatcagcgagatcatccaagaatcgccgaaaagcggagcggaagaagcacagcctcaaagaaggcagtccgctggaggacctggccctcctggaggcactgagtgaagtggtgcagaacactgaaaacctgaaagatgaagtataccatattttaaaggtactctttctctttgagtttgatgaacaaggaagggaattacagaaggcctttgaagatacgctgcagttgatggaaaggtcacttccagaaatttggactcttacttaccagcagaattcagctaccccggttctaggtcccaattctactgcaaatagtatcatggcatcttatcagcaacagaagacttcggttcctgttcttgatgctgagctttttataccaccaaagatcaacagaagaacccagtggaagctgagcctgctagactgagtgactgcagttaggagggatccgacagagaagaccatttccactcattcctgttgtcctaccaccccttgctctttgagggctggctattgagaactggaaagagtaaaatgataacttaccttagcattgccaagaacttcagcagacaacaagcaattctatttattttatgttgtgtatacatcttgatcattagcaagacattaagctttaaccattatggcaccattttgtgagaatgattgttctttcacttgggctgtttgagagcataattatggtaatcatgagattaatgtttcatgatttctacctccaaagtgtgaagacaagtaaaacaatgtttctaaattgtcttattttgttggcggagaagattacaatggctattagtgctacatttggtcaaatgtaatcacttaaatagcttcttgtcaccttaaactaaagcagaataaaaagtatcctttgaaattataagccctcctttgctgacagctattattttgtaacatcttaccaggtcatgtgctttcagttataactgggctgagcctcctataattacaatgtctatagggactgttttactgcctgtgtattttctgctagagagttagcaatgttagagctagaacagattagaatttctaaacagtatcatgcacagttggtgtgagtgatcagtgtgcattgtatggcatgcatggttgtgaattattctctgttctccaaatactgtttctttaactcagatatttttgttagtgtctaggccacttcatttatttttcgtcatggtactttactgacttctctttattcaattctccacgccctcaccaaaaaaaactgtctcaaaatgagaatattttattttcatggtgagtctagaaaacgcccacttcattctgattaaaaattcttccatgttttaaatatcagaaccagacctttcttactgtgtatcttagcccatttgtgtctctataacaacaaccagctttcaaaggaactaatagagtgaaaactcactcattaccacgaggatggcacaagcgattcacgtaggatctgcccctgtgaccaaaacacctcccattgggccccacttccaacactggtgatcacatttcaacatgaggtttagggaaacaaatgcctaaactacagcactgtacataaactaacaggaaatgctgcttttgatcctcaaagaagtgatatagccaaaattgtaatttaagaagcctttcccagtatagcaagatgttaactatagaatcaatctaggagtattcactgtaaaattcaacttttctgtatgtttgaacattttcacaatctcataggagtttttaaaaagaagagaaagaagatatactttgctttggagaaatctactttttgacttacatgggtttgctgtaattaagtgcccaatattgaaaggctgcaagtactttgtaatcactctttggcatgggtaaataagcatggtaacttatattgaaatatagtgctcttgctttggataactgtaaagggacccatgctgatagactggaaatagaagtaaatgtgtttattgaaaaaaaaaaaaaaaa

SEQ ID NO: 94 - DNA, 52511 bp, Homo sapiens
  source 1..52511: mol_type = genomic DNA
aggtcagccatagatcaaaatgtcactgccaggctctgccaggcttcgatggatatgtgagtgtgttgggtttgggttttgttttgtcttgttttgttgggggtggaggtgttagggaaggtgggaggggaaatcagttgaggggggcactctcacacacactgattcagacccctgcggcccacagtaaaacccagccctgtccccaaggaattcacagaacaaggattgatttctccctggtggaaaagtgcaggaggaagccaggactgaaggtacgctggaggtgagggcgtagcaagggctgacagtccaggagggccatgaacctcgacaagagtatccagagaaggccgggcgcggtggcccgcgcctgtaatcccagcactttgggaggccgaggtgggcagatcacgaggtcaggagatcgagaccttcctggcgaacacggtgaaaccccgtctctactaaaaatacaaaaaaaaaaaattagccgggcgtggtggcgggcgcctgtagtcccagctactcgggaggctgaggcaggagaatggcgtgaacccgggaggcggagcttgcagtgagccaagatcatgccactgcactgtagcctgggcgacagagcgagactccgtctcgggggggaaaaaaaaagaatatccagagaaaacggactagattgccccgccccccgcccgtgtaaatagtttccgtatctctctattccggtccccacaaaaaagtcccaaacctcctccctacgtctccacgatcttcttcctcaaacgcatgtgttcaggtaccacttccagagaaataccagcttgaagcccagctactgccacctcaggcccataggcacactggggcccatttgctcccaggcttcagtgggaggcgacgactcagcaccttcgactccagcctcgcagcggccccgccccacagaggcctggccccgcccctccgcgctcaggccccgcccccagctccgagggcggctggcccggtcgcggtcgcggctctttccagctcctggcagccgggcacccgaaggaacgggtcgtgcaacgacgcagctggacctggcccagccatggaccgaaaagtggcccgagaattccggcataaggtcagagctgcagggcgccccaggcttctgggactccggagtcctgggcgcggtgggtagggggtggacaccccggcactgcccctcccttttccggccccacctgatggctctggttgggctgggacacccgagggtcgtctggctggcagcagggatccccagtaaagtgagggagggaatgcggggactcccggctcaaggactgctaaacgagtcgatcttctgccagcctttctccctctgccttccaggggcagggacgtctctggggtttgaattccttccagtcttggccgcttttctgaggtgccccctttgtgggcaagcccctctccttcctagtgcccccagctcagggctgttgaggcatgtggagacagtctggggcagtatctgagaggtgagggttgggagaagggaaactagacgtctctctctctgccttttgacctcagaacatgagttagaagcatttcagccctgcctgcctaagggcgtttcttagggtctgagaagtagctgaggagctggtgctgacccgggtgcggtggggaggaagggaggaggtactgagggcgtcggagctgggctctggccggccagatccttcaggcagagccgggtccaccctggtgtgtcccagtgaggggcctcactggtggtctgggattctcaaggaccatctctggaagtggccaggtttcacacagggcatttcgagaatgattcacaaagctgtgcagaatctgctgaggccctgagaccagagagggccatcaaagagatccagcctacttccccaccaagtcttaggatgcctctgagtctggggatgaagccgcttggggggggtgggtggtatctggagctccccacaggccctgcctgaggggcaggtaactattgataacttaactattgataactgtgtgacccaaggctctcccaaagaccccaggggcagtgtctttagaccaagccaaacctcttcctggtttgagagctgagctcaggtagggcaggtcagggtgcttaactccttccttcccataaagaggcccataggagcccaaggagctagccagtgtaggggccacaggggcttggggccaagggcccggggtcagttattcatttaataagcatgttttgagcatcctctcagccatacccagtctgtgccctttgctggtggtgtaggtgggaggcagaccctaccctggtaattacccatgtctgagtgctgcgtgttgaggccaagcttttgtaggggcacaaagggacagctcaaactggcagaaggctcctgaaaacaaggtcttgggcatttctggtcctgctcccaggggtgggtgatagctggaagttcagcaggaatttaggggctggcgaataccaaggggagcttgagagagcattcactgttacatcctgttgcaaagagacatgtcggaagaaatttcagccactaaggacattttgtgagtgtagatttcaggcaacccagtttgaaggagctcagccttccatcccccaacccaagactcagggttgaatttcagtttcctgcccctggcctgaaataacatcaggtcttctgccttcactctgtggggtacctgctctctcttttttgtgagaatcatctccagggtccctggtgtctgatgcagatcctgggtttgccctgttcctcttccccaggtcccacaggctccaaagggcctcagacctccacgtttcctctgccctactcttcctcatcgcaacagtcattacttattaatatccctgtgtgcaggcagggcaggcgccatgcgctaggcaaggcccaggctggactttgtgccctgctgccttggagacagccacagccttcccctcccaggttggggatcatccaggaactggggagagaggatgaagcacagaggatagaaaggaggcacacagacatgctgggagaaatttacagcttgctgttgtttgctttgtaggggtcccttccttagtgttttggaagaaatggtttgtgatctaaatccttagttgttggaagtaatatttaaggtagtgtgttataatggaaagtgctctgtgaccttgagcaagttacttaatctctctgtgcctcagtgctcttacttgtgaaaagagataacaatatttaacgaataaggttaccatgaatgctgaatgagacctacatgtgtgtggggagcttaaatagaccctggcacttagggagctctcaagaaatgtccatgttgattattatctggagttagcagaactgggaccaaatcttagccctgtcactgtcaggaagaccttgaccaagccacccactctccctgagttttagtttcttcagctatgagatggagtttgtagaacttacctcacaagacagtcaaaactaactagcaattaaagtactggctgctctgggcccacagtaaccacactgtttccagctgatacctgcagagtgtccagtgggagccaacaggctccaggcatcgactccctttgatttgtgaagttaccccaaggccgccaggagcacttgcatacccttccagtaactagtagcaaccttgggccaggatgtgggggagcagggcttggtcagagactgttttctccctcagagaaccagctttcaaagggagactgctcttctgttcgcagcaccagcacagggtaggaacttggttactcattggcttaaaagtatttattgcctcttcagcaatcatgcatttatgagcatagctgtgtattctgcctgaggccaggcatctgacaaccggttgggatgaataagatcagaaagagccaccactctctaggaatttgttaatcattcatttattcacataggcaataaatattgactgagcccttaatatatgccaggcagtactctaagcatcaaaaaacaaaataaagcccttgctgtcttagacagtacattccagtagggaagacaggtagttaaaaggaaatcaacaaaagtatcatacaatgccagatagtgataaattctatgaaaaaataaactaagatggggagagagagatagtaagtgacaaggtaggcagtcacgaaggcctctctgaagaggtgacatctgagcagagacctagaagaagtgaggagaaggagccacagagatacatgtagaagagcattccctaaagtggaagcaacaagtgtgaaggccctgaggcaagcagatgcccgcctgtatggaacagcaagtaggacagtgtgtcccagaggaatcgtgagtggagaatggtgagaaatgggtcggaggggtggtaggggcctggtaggccatggtcaggtcaggattttcttgtaagtgtgaatgatttacatttaaaaggaattgttctggctgctctgtagagaatccactgaggggcccaagagtagaaggggacctcagtcaggaggctcctgcaggagcccaggccagaggcaggggctcggactcgggtgagaatgggtcggattcaggatacatgttaaaggaaaaactgacaggctttgctgatggattggctgcgagcgtagaaagagaggcatcaagggtgaatccacatttggtggagacggagcaggttggtggagacggagcaggaggtggtggaaacctagcgttccacttcgaatgctgtaagtttgagacgcctgctagaggtgactgagaaggctgtaggtctggcctggagataagcatcggtaggtccttgggggtgtgagtggtatttaaacccctgagatgaatgaggtcacttagagagacagtgcagatggagaggagacctaggacagagcccggggtacctcaacttttggaggagaaggagcagcaagcgaggaaggaaagcaaggagaagcagggcgtgattgctgtgccaggcacagggtgaaatactacaaactagctgacatgtcaagagcctctgaaaagatgaagggcactgtctatgtccttgatggtggtgatgctttcacacgtgcacatttatccccaaactcatcaggttgtatacactaaatatatacagcgctttacatgtcaggcatacctcaataaagtggttccagaaaaagaaaagaagtcaggtgtggcggctcacgcctgaaatcccagcattttgggaggctgaggtgggagaatcacttgagtccatgagtttgagaccagcctgggcaacatagcgagaccccatctctacaaaaaatacaaaaattagccaggtgtggtgttgtgcacctgtagtcccagctacttgagaggttgaggcaggagaatcaattgagcctggaggttgaggctgcagtgagctgtggtcacaccactgcactccagcttgggtgacagagtaagacctggtctcaaaaaaaaaaaaaaaaagaaaaagaaagaaacagaaacagaaagaaaagaaagagagagagacagagacagagacagagagaaccctagacaagaaagaaagaaagcaaaagaaaaagaaaagatggatgataagaaaatgagagtcaaataaagcctggtaccactgggatgcacactctaaaggcctgggaagaagtgtggctggatctattcatcccactaacatctacagagggccactcgctgcccactgctgtggatatagaatttatgtccacttattgtcacttagttttatgtaacaaacacaggacttactacctgccaggcactgttctgaactcttcataattattaactcattaaattaatactaaaaaacaatgattaatctctcatagtgattaaatcccattttaaaaagagatgttagtcctcattttacagataaggaaactgaggcacagagaggagcagacccagttggggaaggggttctttggctctaccaccacactcacaagccaggcctgtgtctgggccacacacaggcttgtggggagacaggagggtaaagggagaaagttcagcacagcttggtgagtcccatggcagagttggggacaaagtgctgttgtgtgcacagagaaagatgtggccagctttgtgtgggagcctaaggaaagacttggccaagaagaggcgacatttgaagtgagtcttaaagatagaggaggagtccacagagaggaaatactgctggtaccaccattgctaatggctaaccagggtggcagcagggagcaggtggctcgtccaagggggaagccaagaaagctttatgaacaggttctacagaaaagggcaggattaaatgacccaacaagctgcaccctggggccagatgcaggaggccagcatccctgaaggggccagtagagggaaggttaccagaacaggtgagaaccagggctgccaaagaggcccagacagcagctgcagccttgggtggaggaacctgcctaactgtggcccagcagccagcccccagggactaggagcctcagttcctgtctccccacgcctctcatctcctgcttgtgcctcccgatggctgaacacagcagaaagccagaggggagaggagcccaggcagagccctctggacaaagggcagggtggagaaggctggaggcatgaaaggaaaagatctagcacacattttggagaccttgaaatgtcccaggcattgtcatacgtgctttacacatactcactcatttaatccccgcaacagcccaaagagacttcatcaagcagaacaacatgcattatttaatttgttctggctctctttctccctgtttggctgggtgcacacctaaagttgaatcttcctgagttgactgtcccatggttcccctgtgtagctatcctgaagggccagtccatatgggggaatacagagggatgagactggagggtaccacatggccaaacccagcttttgcctccaataccctagacaaggggcctgaagattgtgagggtggagatgctccctgtcccctcctccctcccacacagaccaatagcacagtgccagagaaacatcagtcagcaaatgctaatctaggcagggctggcagcaggggcagggggtagcagggatgataatagagatccccaacagctatttgtagatggtgggctcctttagggcttctgtgcttaatatcaagagggatccaagaaaaggaaaggctttctaaatctagtcggagaaagaagactggtgtctttcccacagtaggtgttcaatagatgtgtaatggacaagtggacaacaaaggagttatatttcataagtggataccatgtggtagattgaaaaaaagcagaggttttggagccagtaggcataggttggggtctcaattctgtcacttctctgagcctctgtttcctcatctgtaaagtggggatgataacgttcacctcagagggttgttaggatattaaagataatacacgtaaagttcctcaggcagtggacagtcagtagggagaggctggctgggataagtgagccagacagaaagagactcaggctgggaggcaggtgaggaggctccagactctagaagaggggacttgggcctcatctgaaatgaaggcaggattcagatgagaggaggaaagctgtccattgtggatagatggagtcgctgggacctacttttttgtgatgaattggaagtgaactaaggggaggcagacccagaatatatgtgctgaggaccagtggaaaggtggtgacccaggcctgggccaacaggtcagaaagaaggctctagactagagcaaatagagttcacgtttcatcaacggacgccactgggcaccgtgcgcttgtgtgcatgacatggttctgggttccacagggaaatgaagaacatgtttggaaggaagggaagaaaggagtgtgggagatttactgcgtgcctagtgcttcgtatgtacctgagtacagggtactgggacaatggtacaaagcaccctagagcaggggctccccaaaactgatcctcgggctagtgctaggcagaattccagaagagaggaaactatataattttttaatattggaaaagtaatttgatttggaccacagggaagactacaaagaaaaagtaatttaagtgatggtggtattgttactgcacgttcaggctttagagaaacttccatctttctcagctttctttcctggtgccttttaatgcctgaagagtgaggtgtgagtgtgtgttttcactcaggtgtggtcagagaacaaagcagtgctgttctttctgagtctttctgagatatttctgggtgagaatgatccctccctttgcaggatctcctgtgtaaccagttttcaagtttttgatgatctatcacttagattcatatttaaagagcattctacacaaaccagatctattttccctgttagctggtatggtctatagagaattgtttaaatagacaagtcagacatggcggtagatggaatgttctgagtgaggacaaggagattccagtgtgtcaggggaaggatctgttccactgcagctgagtcccacttgggatgtggtgaagcgagcaatggcagaactgaggacagggtttgagtgacctaaccggtgacagtgggtggacatgaggccgaagagctgagctctgcagctgtctcaggagacaggtaggatgagacctctgggagcagtggtcagtgctggagggctgctgacaagggccaggagcccgggaccttcagggacaggctcctttccaccaagaccatctccaagtgatctgtgcttggcccagggaagggagaaaaacagaaccctagaccctaacattgcaagttaccttactcttctacctcagttttccacctaatgcacaataaacatggtctaaggaggacagttcctcactactgaaatctaatgctacagcaagatacatttctgcaaagagggataagagggaacttcagtcctaaggcctcagtcaataagagattctctgtcccatcttctttcttgtgtcaccacccagggttataactaggctagaagtctttagtcagggtgtcctctcttcagccaaagcagacgtgatttttatgctccccttagaaagtacaacacttgggttcaaagagtcattcaaaagatgtcccattttctcactcattatagaccaagccaaaagtgttttcttaacagtgcagaggagagagatggggcttagagataagaaaggagttcttgaaagcaaagggttggaaattttggcctaaagggacattgggagttattttcccctgccaggcctgagtcacaatcaatggtcatcgtggcgtagcagaaagaacatgggctttggagtcagacttaggttcatatcctagctctgcttattagctgtgggacactgggtgagttgacttaacctctctgatcctcagtttcctcagctgcagcattatgtgagaatattgccccaatgtgataaacaaatggaataaagcccatgaaaagctcctggtgccaccgcatggggcattatggggacaacatcatttcccttccccttctgttcccatggttacctccctcccacctgaaccatgtgggcataccaggaggcaggcagataaattcattcaatacttctttattgagagcttattatgtgttgggcacgagaaatttagaacaaaatagatctcatctttcccctcatgggatttttctgtccagcgaaggtgacagagaaaacaattcacagagaaaacaaaccttaaattacaaattgtagtcgatctgtgaaggaattgaaacatctccggggtgcaggagtcggttctgtctgggtaggtgagcagggaagacctctctggaaaggaggtggccaggcagggaagtgggggaagcagtccaagcagagggaacaagcatacgccaaggccctgaggctggagagcgttcggcctgtgggaagaactgaaaggaggactttgtagccaggaagactggtaggagaggagattgggctttgataagtcaaagtaaggagtttggatttaggtttggtttggggtacaagaaactactgagcaagcaagcaacatatctaatttataaagatatttctcgcccctgctgctaggagagttcatactcctccatcacagcccagtgtgggcagcccaggcctgtctcagggaggcacccctgccccacaggcctgagcagagggggtgagagaatccaggctatgtggagagatgagctttcagaggtggtgggtgcgaaaggccagcctcccaccctaagatttagtaccacccactcaagcagatgcttccatctcctgtcatctgggagctcctttttttttttttttttttgagatggagtctcgctctgtcacccagcctggagtgcagtggtgcaatcttggctcactgcaacctccgcctcccgagttcaagtgattctcctgcctcagcctcctaagtagctgggattacaggggcataccactacgcccagctaatttttgtattttaatagagacagggttttgccatgttagcgaggctggtctcaaactcctgatctcaggtgatctgcccacctcggcctcccaaagtgctgggattataggcgtgagccaccgcacccagccctagctgggaactccttgcactgaggtagggagaaagcaagggtgcccttttggagcaggtgggctgaacttctgtagcaactaaagcccaagctgtgagtcaagcctcccaagttattctcacctttaatgaaatgctcagtctgattttatagggaaggaggtactgtcagatctaggccagaaatctgcattctgtaccccctgctcaggccagaaatcccaagggctgggcccagcatgtcccctctgtggtgggacggacagactgccccggtcttccagaacccttgggatacccacagaaagaggtaacgctgctctggccctcttctgaggacgagtcagtggagagcatgcagcttccagctgcagcctctctatgaagggctgaggccctgggccgggaggctggaggagagagggacccagtgaccccccaagcttccaccttgctctgttacccgttcttgggctgaagagagacccaaaaatacagtgtagagattcacactgaggtaactcagggagtggaattcagggcctcccgctgggattgaggtgctaatgacacaactcctgaacctgaccttagagtgccagccattgacgtcaacaaagttgaaatgatgtaacctgacgctccccctgcggggcttgtgcaggggcctggggagggggaaggagtggccatgaaactgactagtggacagaacccagctaaggtcaggacaagacagagtgaaggtcccctggcactgatgttacagaagaattcggtggtaaggggcttctggagagtggcatgtgctatctaagcgagtggcccaaatccttcctgaaagcatttatccggcactacagccaccatcaggtaagacagtgggcttcttctggccatggatgacacagccatgggggtgagcagcagcactgccatggcagcgtgtcactgtcacatggggattcacatatgtacctatgtgtgttcatccccgtgtgtgcacatattgccccacctggggacaaagggtgcctggccacatctggaggggcagcggtactcctgtggccacgttggggtggtctgcataggtctgatgcattggggtcagaggggcagcctggcctgtggctcctcttctctcctcacaactccagccctgaaaagctgctggggaggcccttggggatgacctctcctccctgaggtctgctatgggggcgggtgctgagcctggagctgtgattctgctattggattttccaggtggattttctgattgaaaatgatgcagagaaggactatctctatgatgtgctgcgaatgtaccaccagtaagtgtgctgggtccagctcttgtgggccacttgggttcctttgtcttcagggagccctgggatgggttgttctgagacagaggagctcagagggtggatgctcacggctcctggaaatcaaatggacataccattcactcatttcagcaactatttacacaagtactttgtacttggctttgtactaggggctgggtatagttgtgagccagacagattggtctctgttttcaggttgctcacagtctgatggaggaggctgtctagtagccagatagattctatagagcatgattgttgggacagaacaagaaatgccagctggccacagcccttgcatcagatgtctccgatcacccacttgctttttgattcattttttctactttataagctcctgccactgctgggcactgtgcagaatctggaaatgaattagatccaatttctttccttgagtaacttgtggtctggtgaggggagatgaacatacactgcaaacacaaagaactctaatataagttacatcaaataactgctaagtagaggtaaaagcagaaatgtgaagaaaggagttttcctttccaactgcgagggaagaggaaggaccaggaaggcttgagcaaggctttgaaggataagaaagatttggggccaggcaaggtggctcatgcctgtaatcccagaactttgagaagctgaggcaggaggattgcttgagcctaagagttagagaccagcctgggcaacatggtgaaatcccatctctacaaaaaaatacaaaaaattagccgggtatggtggcgcgtgcctgtagtcccagctacttaggagactgaggtgggaatatcacctgaacccaggaggtcaaggctgcagtgagccatgattgcatcaatgcactccagcctgggcaagacagcaagaccctgtctcaaaaaaataataataaaagaaaaagattttggtaggtggaatatctgggaagggcattccagaatgagggatcagcatcagccaaagtgtggaggcatgaaagcaagggtgtgaatggagataagtaatctgggggagtaggacttgggagggcacggagatcataaatagccacaaggctggagaagctccatggggacaggtcatggagggccttgagcctgctgagaagagtggactttgtcctctgggcagtaaggggccatcaaagggttttaagccagggagtgccttacactgagaaaagatgacgtgacagtgagtacatgggcaggcagctgcagtcgaaggtctgaacagcatgagggaggaggcatgtgaactgtggtgaggtgaaattgacagagcttagcagcagatacgagtggagatgatgagtgtgtgaggaattgtcagcatctcacacagagctttcccctctggaaagatcccaacagccgagataggcagcgctgagtttgaaatcctggcttcatctcatctgcaaaatgagtcaacaatccctagtagactggtttcctggggatatttatataagagaacaaagtcttctcaggcactggcccggtgtgaagagctctgggcttttcaggagtggtctactccattcctaagcctgggcccagtggctgaaatggcttcctcttggaatccctgggtgcctgaggtcatggccaggggtgaggctccaggcattcccggcatctccacaggaccatggacgtggccgtgctcgtgggagacctgaagctggtcatcaatgaacccagccgtctgcctctgtttgatgccattcggccgctgatcccactgaagcaccaggtggaatatgatcagctgaccccccggcgctccaggtgcagaggaagccaccaggctggaggcagggggtggagagatcaccctgggcggggcagtgctggcagccaagctgcaccatcaccgacctctcctgtgtggcaggaagctgaaggaggtgcgtctggaccgtctgcaccccgaaggcctcggcctgagtgtgcgtggtggcctggagtttggctgtgggctcttcatctcccacctcatcaaaggcggtcaggcagacagcgtcgggctccaggtgagcaaacagagtccgggggagggggagcgagggcctcggacctcctgcctccccctcattcatccactaggctgtgtggcacaacatggtcacccacttttctgagccttcgggtgaagaagaggctggcgcatcctgatgggtgttcttaggctcatagaaatcaggccgcaggcaattgcctgttttcttgagtgaagctggtaacctggctgctgcctgcttccaactgctgcctccttccagctgctgccgctgcacttccccccacctcccctactccccaagagaggaagacagtgatgctggcatatgaagttttggacctgttgccttttaccagcagggggaaagaaagcctggtgcagtgtgatgccgaagagcatagactctgaagcagggttagccgggttcaattctggctttgctgttcattaggctgtgtgacttggtggaatgacttaaccctgtgcttcaatttcctcatctataaaatgagttgccgatagtactgtctacctcgtcaggttttgttagtaaatgaattaatagtagaaagtgcttatagcagggcctggcatacaaatgctgtgagcctggtaagtgaacagagagagggagatttaagaaacgcctggaatgtgccaggtcacatgctcacaagcagtccttgctatatgcattgaacggatcgtgcccattttacagaattaatagaggctcagaggccagtaagtggcagagccaggattagaaactaactgggtctcctgactgccaagcccagaaatctctcttcagcaacgcaggtgcctctcctttggggtccccacacctcagggcctgagcagagatgggcagacctccaggtctcactcctacctgagcccagggctgtgtttttgtgtgttgagataaaggaggccctcccaccatcaccaagagcttccagcgggtttgttatcaacatcccaatccaggctgccaagcttggggctttcaaggggctcgaaggctaatggtacaagacactgtggcgtaaggggtggaaacagggagctgacagacaccgctttgttctaaatccctgtctcacggctccctggtggtgtctgaaatttcagccccttcattatttctttcctctgcagcacattttccagctcagaaatgcagccagagaaaacacataatgagcgcctctcttggcgtcagctgaggccgccttttttccagggcgagctctcttaggacaagcagttctcaatgctgcctcgatgactgggggcgttggggtattttaatgagacctacagttttaccttcctggctgtttctcaggcttatgaattatcggccctttctctagctgacgggttcatctctcctttgtgccgctgtccctcagatcgttatatcatcgtggcccttgcacaaagggccctttgcagggctccacacagggcgagacggggaggaaagttgatcctgcaacctgagccaggggctgtgtgggaatcattccgactggggttctgggcaaattccctttaggaataagacagggaactttactcagaggagcttcgggaaaaatggctgcatccattgacctgtctggggttcatgcttctggggagatctcatgcctgagggcaactggaagaagatgctggaaggcaggggatgagcaggttcagatacagcccggctgggctaaagacctgtgctgatttgacctgtgaggctgggtccccagtggtgggcttggaccctcccacaggacctagtcctgggggtccacccctctgcccttgtcccctgctggagatacttggtttttgtttttttttccccaagaatatcctaacttaacctacatcctctgccttgcacagggcagcctgtgacatacaacttgctgtatattccagacctagaaaattattctgtgtgctttggttttccctgtcataacatggacagctgcctttgtgtgggacttgagggctctgacaggtggcaaggatccagagagggcaggatgcagggaattgcagctaggcttggccggatgcccttcttttctacttccagacacccaagagacaccacttgtcgatcagggagacctgacttcaaatcccacgacactgtttactattggggtaaccttgagcaagtcactttacctctctgagcctcagttttctcatccgattaacagagatacaaattcctgctctgcagggttgttgtgaaaaataggtggaaggagttagtctggccgctgtccttgaattacatgttcccagaaacctagagagttctttagtgggcccccaccccagtgccattttgagcccttggccactcctgtcaggtccctgagaagactggggtctgtgtcccggagtgggagggaagcgttccttggaatagtgagaaggtgactctgtgggaatgctgtagagggcaggagttgccctagaggacccctcggaggctgcatgtccacccagcccctacctacctagacccacagggagtccagcttgcatccctcacgtgtgccagcacgtctccaaagggtgagcacgtgtgtttcgagttaagcccccagctgacctgcactggcctcagaccggaacctctccaggagccagtctctgttttgcagctactggctgtgtgaccttggacaaaacctcacttccttgggcttcagcttcagctgttatctgagagttcctcctgccctgtggttattaaatgaggagctccagaattgatccccagggccggggtgcctggaggagccggcagtatccagcagggggcaatctcaccacggctctgtatccagggctggctgcccagggcccatctcaacaatccactgtggcctaagccctgagaagagagatctgagctgagtattcagggatcaggactaactcatgataacaatagcaatcatgtattgagtgcttactgtgtggcaggcactagctgtctttacatgcacaagttcacttaattctcacagcaaccttggtattccccattttacagacgaggaaaacaggttcagacagttcaagagacttgctcaaggtcatatagctaataataataaaagaagggatttgaacccagcacatctgatgccaaagccctgtgctcgttcactgttctttgcttgctcccaaaataggaattcagaggtcagggccacagcagagttaaaatgttcatcaagtttccatatgatgggaaaaaaaaatcatatgtgtgtgtgtgttggtgatgtgagcttgggtcaggagtcacagaaggtccccaccccgactcagttacagtgttgtagcaattaacagagatagggagccaacttcctaggggtgggttgggacaaagtcccggtaagaatagcttaaagctgagtgaaatgtcaccctttgcatagaatccagaatctgatggtgccccagtggagtgaaaggggcactagagtgagggtgcagagagttctgagatcttctcccagctctgctgcacacccgctgtgcccctcacccctgtcttggtttctccatctgtaaaatggggcgacaagactgcttggacatgccacctgaacctgggatcccccgggctgatggagggtgggttggttgagatcaaggcttattccagggggtggcacagccacccttcccttttccggagagcagtccgggagcatctggtggtgagtctgccccactgcctgatgctccctccacctggtgctccctgcctctctctgtggtcaaggtaggggacgagatcgtccggatcaatggatattccatctcctcctgtacccatgaggaggtcatcaacctcattcgaaccaagaaaactgtgtccatcaaagtgagacgtgagtgaggccagagcagggcagtactccataacggtgggagggagggagggcgggggagcagggcagtactccatgacggtgggagggagggagggcgggggagcaggtcagtactccatgacggtgggagggagggagggcgggggagctgtcctaacccctgtgcctttctcccgcagacatcggcctgatccccgtgaaaaggtgagaggcccctcctctgcaggccaactcttccctgtgggcccaggatcctggtacagccctggggtccggctcccaccatgccagccctgcttctgggccagtggaggctggaggctctagacatggtggatctggatgtggggcctggttcctcaaacgtctctcgctaaccaccctcccatctattttcccttcccatcagctctcctgatgagcccctcacttggcagtatgtggatcagtttgtgtcggaatctggggtaagggccagacctcctgtgatggggtttgggtggggtcatcttcaaggaggggtggccggtcctgaagggagggcttgctctagagatgcaccctcaggggcttcacacaggctcccagggcagccagcacaccgctgtggggcagcagccctcggccaggcccagctggtgcagacacatccccagggacggaatgatgatctggctggcgtgagttcagcagtgctcgccctgcagatcccacaagctcaagaggccgcttgcacgcatgtggacactccgtgattctgcttctatctctctttcagggcgtgcgaggcagcctgggctcccctggaaatcgggaaaacaaggagaagaaggtcttcatcagcctggtaggctcccgaggccttggctgcaggtgggtggcaggcatgccctggggtcattcgtggccagtgcaccccagcaggcccctattgccctccccttcctcactgccacttccgaggaaaccttgcccaccaggggtgtgactgtccatgggtgatgatactttttttgttagatacagggtctgactctgttgcccaggctggagtgcagtggcatgatcatagctcactgtagcctcaacctccccagctcaagcaatcctcccacctcagcctcctgagtagctggatctacaggaacacactgccatacccagctaacttttaatttttttgtagagatggagttttgttatgttgcccaggctggtctcaaactcctgggctcaagtgatcctcccacctcagcctcccaaagccctgggattagaggcatgaagcaccgcacccagccttggtgttgacacttcttggtgcctgatttcccctctgaacttcatgacaggcctttagggccagagggtcatctctaacagagcccaatttacagatgaggaaattgaggcccagaggcagaacagtgttaccttgtgggcccttgagtcactgcaaaaggagcctgtttggctggtcatctctgtcacagctctcttgtcacttattaacttgttggcttccttaagaggcagacagggaattccgaacagacactgggccacacggggcttaagcatgcaggtgccaccgttactcagatcccagttccagccctgctttcccacttaagagctctggaaccttgggccagttacttaaccactttgagcctcagtttctccctctataaatgggcgataataattcccacatcacagggtggttgtggagaaagtaaagtgccaaacttagtacctgctaaatagtaagcagttggtaaatattagctattattatttaagttatccctgttctttcctttcattcacatttattcaatgttttgtgccaagcacaagtgataaaaagtcccacctttctgggagacaacagcctaatctagaagccaaccaagtaaatagttataatatagggtgatagggactcgaacgggactacattctgcgtccaggatggcaaataggtgccatctctagtcaatgagtagcagctccctggagtgctgctttgaaaagcattctaaagctgtatccaggattgtgggaaagagtgctgtgatcaatgagtgacttctgccaccaatctaggaaggaatactaacagtacatgtaccatccttgccgtaaatgtcataggagcactgagaacagagcggctagtttagtcttgggatagaataagggatctgagccaggcatggtggtgcacacctgtagtcgcagctaggctgaggtgggaagattgcttgatcccaggagttggaggttgcagagagctatgatcacaccactgcactccaacctgggtgacagagcaagaccctgtctctaaaaaataaatttaaaaaaataagaggatctggtaaaaaccttatagaagggatagcatttgagtcttaatggatggacaggaaagtgctagaaagaaagaagaaacagcatatgaggtatattaggtgagaggttgggtaggaagaattacaaggatttttctgtggctgttgcccagggtagcagtagaaatcaggctggagagggacacagaggctgaagaggtaggcagtcaagggccttcagtcctcagctcatgagtgacctgtatcctgagcactggacatgggttacctgaatcccgagcacacatttcccacctcccgcagcatttccagcggccccatccagaagcctggcatctttatcagccatgtgaaacctggctccctgtctgctgaggtgggattggaggtgagtgacgctgggccggccccagtgggggcccactggaaattgggtcagactgtgatcccgcggtgacaggggcaggtgcctttccacatggccctctttcagtggacactgagggagtaggagccctacccaccctgcagagaaggcttcacagactggggatgtttgacccttctgcagccttccccagctctgatagttgttggtcacgagcttgggaatgtcgtaatggtaatcaaagagcggaccttcagtgtccacttgcatcagacattgttccatgccctttacacttcacaagaatgctgagggttaagtaccaccattatccccactttacatatgaggaaactgagacccagagaaagtatatgatttttccaaaatcgtgtacctcatatggtagggctgggattcaaacctaggtggtccaatcccaaagcaggaacccttaacctcttctttggacaagttacttcatgtctgtttgcttacctgtaagatggggataatacaggctttcttccaaggttgttgtgtgggttaaagtaattaatatgtatactagagctgtgccaagcacattgtaagtgatcagtgaatgttagctattctgttatgacgattcaacacagcctgtgctaaatgagaagctcaaaggttcccgcatctgcaaactgtgatttttaaagcaaatgtcatcaaatttagccaaagaaatgaacatgtaatggtataatatttgatagttgataagatagttatgaagtaggggagtgccagggtcagctttaagccctcccagagctccaccagagctttccaactgctccattcatcaggaggagctgaggtactgccacttgaagatccagcatctgacccagagcccctgggggagcctgtcctgcagatgagcgagtgtacagatagcgcaaacacactaatctttctccatttccccaccagataggggaccagattgtcgaagtcaatggcgtcgacttctctaacctggatcacaaggaggtgagatgtgggggtcttcacctgttggcccttgtcatctccacaccccacttctcatccccaccaccctggagcctggggccttctgtgctctctgcctggactgctgtggtctgtcaggcctcggcccactgtccttctgtccccacaggctgtaaatgtgctgaagagtagccgcagcctgaccatctccattgtagctgcagctgtaagtccagaatgagctggtgggagccccttgaccttcatccccagcccctctgacctttgatctctgccacacactcccagggtggctggtctccttccctgaagctctgacagagcagagcgagaggacttctgcccagcaagaagtttgggtcagggattgcgggagccgcagtgcctgatggtgctgagaagaccacctgcatctcggcccccaggggtgtgtcaggggatccccaggttccccgggggctgagcaaggggcctcttttctcccatgagggccgggagctgttcatgacagaccgggagcggctggcagaggcgcggcagcgtgagctgcagcggcaggagcttctcatgcagaagcggctggcgatggagtccaacaagatcctccaggagcagcaggagatggagcggcagtgagtgcagccagccctggatgccctgtcccgcctcccaccccaccacacgaccccacctagcttgcttcctgcccgctgtgtccccagccaacttcctcctcctccctggaggccagtcctcagaccagatgagtttggtggtaggtcagcgtatccatccttggcctcagaccacctggctccttcctccttgctgagcagagccccctgtcttccaacattccaagaatatggaaaataagcatcctactagcagtaggctctagctagctaggattagctaccagctaacatttgtcaagtacctccataaggctggtgttgtattagggccttgtttatgtttcttaattcccacaatagccctgggaggtagagagtattaaccccattttagaggtgtggagactgacactcagagaggtgaagccacttgtgtctaacgtcacacgtggccaagctgggatcacccccaggcaatctggcaagtccccacagggctgccctgcctatagtgatgaagctcacccttgtccaggaggattgaaatgatggcctaagagaataaatggggtgagcaattcataaatcaaaaactactgtcaagatccaaatccaaataccttttaggcatttaaaagtatttcatggctggacgcagtgactcacgcctgttatcccagcactttggaggtcgaggccggcagatcatctgaggtcaggagttcgagaccagcctggccagcatggtgaaactgtgtctctactaaaaatacaaaaaaaaattagctgggcatagtggcatgcgactgtaatcccagcttctcgggaggctgagacatgagaatcacttgaacctgggaggcagaggttgcagtgagctgatatcgcaccactgaactcctgggtgcaaagtgagactttgtctcaatcaatcaatcaattaatgtattttgaaaaggaaagaggaaaggctgtccccatctcccccaacacagagttagctgggagtattccacctggctaggagcccctgctttgctcctggggtcagtccaggccccgcctgtcatcagtcaccttacctaagtgtttggaggagggtgcatggagtgtggccttcacatggatctgcttccctcctcccacagcccagcatctctgctcagccatgccagacaaaaccacgcaagagcacagcgtccagactttgttagataacgtcccccaaaaccaaagctggtccaggcctcctaggaagggagcctggagaaaaatccaacttttctccaaatcaagaattcacagtaaggaagagttcatttctcttgcatagggccaaacatgccaatctgcatttgtgtttcagaaggagaaaagaaattgcccagaaggcagcagaggaaaatgagagataccggaaggagatggaacagtgagtacctcggctccacgcgtgtctgtgcatgaacatcagtgtgctcaggggagtgtggccaaccagaggctgcctccagaaccagtttacctggttctctcatcccctggtgggtcctcctttatttgtagtaaagcctgtcatattatagtaactgaaacatagtctcgtataattgccaaggtggggttcacactcaatttagaatacaagctcggggactttgcttgattcatcatgactagaaccatgaggcttctccccaggctggctggggctctccgatatgcaggagatgggcctatgggggttctgactccagtaacaggcatgggggtctcattttaggattgtagaggaggaagagaagtttaagaagcaatgggaagaagactggggctcaaaggaacagctactcttgcctaaaaccatcactgctgaggtacacccagtaccccttcgcaagccaaagtgtaagtttcatgagccgaggggagaggctaagggaactagtcagaaatgctggccctccctcccctcaccaccacctcctagatggatagcccttggtgctctgggctgtggttccttcatggaggggcagctgtgggtcagagaccatctgccccagcatcgaggtaggagggatctgtctgctccccttgttcacgggccagctccacatacccagctcccaggtcccccacaacactgacatgggcaggctgtcaggctgctgaagagggaataagggccatagtgaaagtggattagctcatgggattaccgtcctaatgttttgggtaccatgtcctcctcctacttggttctgaacaggggctggggtgaagccagcagcagaaaagaggggaaggacctcacatcagagaagggctctggtggtccaaggttgattcataactgtgggaggagcttactaagtgtctccagcccctatatccctgtatgtggaccaaggatggaggcaggaacaggacaaggaggcctctcccagacacccagctatgggctgtggctgtgctgtcctggggcctcagctcatactctccttaccatctcctctcttcatccgtcccacatcctcacctccattttcagtctaagcctctaccacctgctccctgaccaccttctcaaccccagcttccatatgcctctttaagaggcagcccacactgccagaggaaaacggggaccatgacaaccacaagtccaggattgctggttgggtccttactcctgccttccagctgttttgacttatagttgacacaggacaggtcctactccagctgattgtgctcagctgacctgggaacctccagcaaggggctattctggactcaagagcccaggttccccatctctgctgtggggcagtcatttggcatgttgtgatggggtctggacagctctgtccccaactttgggtcacatatgagacctatgggaatgtcaacctgccaacataggccacttgcaccaaggaagaggtgcagggcatctggatggttccatttcacccctccctggtgcagtcaaacagctcccaacacatttcttcctggcagcagggcagtgtcatctcctggtcctctcagaaggacaaagcacactctcatcagcctcccccgtgacattcagtatcagttgaggatatggccagagctaagatcccaatgaatgatcgctgttttagacagacagctaatttgctcttacgagtgaaataggagcttcaggagagaaatcgattttaattgcttctcatggaagtaatcctagtcaatttggtaccttccaagaaattgggcctcagcttcacagcaaacacaccctctcaggagcaatagaaaataaaaaccctttcactagctggttatttatttagtgccttttaaacaaatcaagctctttgaataaaaagaccaagaattttgcatttgctcaaggtaaatgtgatcttaggcagctccacaaagcacaggatggatgacccccgcctgcccgctgagctgggacagctgctgcctctatctgtctctgtatgcaccagcaatttaattctcatttggacctaaggcaggaaatgcagtgaggtccctgagccagctcacctcctgcctcactccctgttccccggggtctagcatggtcagggctgagttggtccagcaggcctgggccccagccagctcctatccaaccacccttcaactcagcacccagtttgcaataggttatacctgactcaggcttctatgcctgcaaggggtgggccctgcttttttttttttcttgagacagagttttgctcttgttgcccaggctggagtgccatggcgtgatctcagctccccgcagcctccgcctcctgggttcaagcaattctcctgcctcaaagcctcccgagtagctgggactacaggcatgcgccaccaagcccagctaattttgtatttttggtagagacagggtttcactatgttggtcaggcaggtcttgaactcccagcctcaggtgatctgcccgtctccacctcccaaagtgctgggattacaggcatgagccactgtgcctggccccgggccctgcattttttaaaataaaagagcatggggcatctcttacctagaaaatgaagtcactcatcctaattatgtgcctgggactgactgccccccaacctgccccagggggcccttaaaattgctcctgcccacctacccgtggctgatccagcagacccccaacattttgccaagccctgaaggccaggacaccaccacagaggctcctaacagaccttcccttagcttaggcaggagttatgtaggtggttatgcaggagttgccaggggcagccttgactaaggatctggtagctgaaggattcttgaaagatggagatgtttaaataggacatctccaaccttctctccctatccaaggccccatcaactatctcccccacctccaccacaagagaccccacgatttggaagttgaggttattttcctaccgaactattaaataatcatttgtgttccattgttttattaagtagtccttgttagtaagggagcatcagggttccactgttgggtaaatgtaatttgagccaagagccaaagaacttaacagcctttgcataggccaatgggcaagttctgttaagcttttaaaatattaaaaagcagctcacaagcaaacgggtatactaccttccagagtcctagggaggccggaggccagagtccaagctggaaactctggaatggagggtttgctcttctctccacattatgtcaaaattcaggtcttcctaactgcatgtaccccttttaccttttgggatgtccccacctcctcaggaccttcagcctccatctgctgcccacactgttcagacatcccctagggtcccagagctccaaggcaagggtgataagcacaaggctggagggtctgttctcccattgcagccccttgccctcaaacgtgtgcgattctcagatattcccatcctcctcactgcacttcccagccttcagcccaataccctacaaaatggttctcatgctaccctcagatctgagtttcctgttgttagccctttgtacagacagaaaaactaaagctgccaaggttgaaaacactgtatgcaccagctcagagcaaaaaacctttgctctgctctcctgaactctgtcccctgcccctgacctcacagctcccatggaggaagctgattacaggtccccaaactcctgagaaggttctccggcctcttgggctcccaagtcccttttggttcaccagcttcctcctcttttccctgggtagatgatcagggagtggaacctgagctcgagcccgcagatgacctggatggaggcacggaggagcagggagagcaggttcgcgtccccgctttgctccctggcctggctgctctgctttaccctgcccgcctcctcctgaccgcagtgcagacacccagcttcaggggcccagcatgtgtgggggccaatagagtctgtaaagctcctccaagccccagcttggcccaagcactgtacacaaagcctagacgacaggactcaatgcccaggctggtagatcagctgttgcacactggtaccactgaaccgctggctcgaatatttagatattgccaaattccccctctgctgctctggcccctcccccaggaccccctagaccactctcaaatccagcaactgaggaggtagtgtctggtccagcaggaggctttcagcatcctgttccagcactcaggctggtccggggtgggtaattcagccatcgctcttggccccagggagcttcagattgggggtattactctgtggagctgcggcctggggaaggaagggggctggtgcactggctatctggcctggatgaggatctgttttctgggggcacatctcctgcccgctcctgctggagctgtccttccaagagctgtcccagccactgccttctctttgaatgttgaaagcggaggacttgacctgcactatgagacaagccagttttgttctgtcgaacaacagttctaggcagacacccaggctcccttttgtctcgagccattttttgtatggagggaccagacatgggttagaaaaggccttgttctctttcaacaaggctttgtatgtgaagactgtgatttggaaaagctcatccttccacaaggggttttctctttgatgttctggccctgacttctgaaaccagtgttctggggagaggcatttgagagtgacccagggcctgggaaccggggcttttctcggtggtcttaggcctgttctgcaaccaaggcaaggccaggtaagccgagttggacagagggtgcagttttgctgtcggatctgccaatgctgtttatctcacaaagtcatgcattccttgggaacccagctcccatctgctgcccatggatgctctggctgagctgaactgtgtctcatcattttgttatctgtgtcttatagcttttggatggttttatcgttacgatggcaaattcccaaccatccggaaggtaggacagggttgggtgctgtgctggtgtgctgcttagtttgctgtgggttttggcttttcccaaacattccttgtcctatcaacactaaatggtgtgacttggcctgttcacttggaaggctaactccatctccatctttgtgtcaggctgacatcaaatggcagggtgctgttgcaaaggcaacattgggagagggatccatggtgtgagacctatccaagtaccatctggcagtgtgtgcatcagcactggccctgatgggaacaggaaaggggcaggaagcttctcctgtgtttctctgtcaagtagaactagagaccaaggccagaagcttggggtcagacagagcaaattatcggagtgggtgtacctagtgcatgttatgagaccagctgtgccagacgcagcctggctgacgaggtggggatttgctgcctcaggttgggacagagacccactccaagcacagccctctcctaggaatatctctgcatgtgcccaggataatgcatttttccaatttctaggacctttaattttctctctaaatcttattacaatatctccaggccttgtaaaactctcttgtccttatctttctaaatcacattgacatttgattgtgaaaacattgctgttaatatctataattggacattcgagatgacttggtatttggaggtcaggcagcagcataaatctgggtgagctaaattggatgttatcacttgaccagcgctttctggcaagatgtcagtcccccagaaaccagagcactggcagctgagtgaccttgatgatatataattctccctgcctgtaaaatgggaatattaactgtgccaggaaaatctacccccttcctccagcacattgctattaaaataacaaacagtaatatttttcctgacagaggttaatgcctttatctaggaacatctatcaggatttgtatagcattgaataaacttggaacagagttcctctgggaattccttcacacattgtcctggtctcagaaaggccttggtctcataagactatctgtttcccttgacaggctgactttggtggcttaggatgcctcattgggttagatttctaattcttctctatattctgcctctactagaactcagctagagaggacaaaacacacacacacacacacaagcacacacacacatgcacacataggattttacttgaaaaaaataataaaggagacagatatgtcaaatctttttcaggcactaataacatgtaaatgtaaaagaactagaatcttctccacataccacctcccatcagaaatcatgtccttgaaagtgctgttgataaagaaatagggttgcctttcccctattccttaatctaattattccagaaacagctgtcattttggttttcattttcacttcaaaaaaaaaaaaaaaaaaagaattgcttctgggtagaatcaatagcacaatcgccccatctgcctcacctctcagtctggaccaaaaggaatattgtaactgacaggccatggatgtaactgacagctgaaaggacaacagaaccatgcccctcatactggctctgaaaacccgtcatcattttttctagagccgtgagagactctttgtctcccagcagctggaacgccaagtctccaggaaatgcaagtgggtatccatggccatgatatctgtgcataaattccccttatttaaaaatataaagattcagctcatgtctataatgccagcactgtgggaggccaagacaggcgaatcacgtgaggttgggagttcaagaccagcctggccaacagggtgaaaccctgtctctattaaaaattcaaaaattagctgggtgtggtggcgcatgcctgtaatcccagctacttgggaggctgaggcaggagaatcacttgaaccctagaggcagaggctgcagtgagccgagattgcaccactgcactccagcctgggtgacagagcaggaccctgtctcaagaaaataataataataatataaagattcagtgtcttctatttccaccttggcagtaaatccctctggggctcaaggttcccaggcctttggccccacagaatttgtgccagggcatgaaggattcatgattctgactaagccctttcatcagaattgcttgagtcactcacacagaccagccctacttgcaggagcccaccgtctggcagggaaggcagattcacacacagctaagtaacctgtgtggggccagtctgagatcagtgggaaatgccatggggcaacttgccctctgcatctgtacagatatgactttcttgggcatgagacagaaactgtctactaccccacccagaagccctgactctataatcttagcactggtagttttttttttctttctttctttctttttttaagcaacagaatggccattattctcgtggtggtcctggaggaggccaggctcttactctagcaagctaccattaggcagtgtttctggctcctcttgggaaattgctgtctgaatctctactacgatggcagggattcatctatcaactgagtctagtgaacaaggtaggcaaggaaccaagcaggactctgaagcagtgagaaccattttctcgagaggctcatacactgctctggaggtgggtcccagaggtgaccatttccagagcacattagcagtacacagaggtgtgtgtctttaggagaggagctaggaagagtccctcagaggtccataatggcccaccaagtccctccagctgtggatgaatgttgtgtgtccattgctagggagctcaattccttattcctggccttggatactaagatgattcagaaaattcaagagcagatccccagaaggcttgttgggggcgggggtgagctcagtgaacagggggtttcctccttgccccagaaattgcccagggtgtgggctgtctctgctgcccctctcctgaatgctcgctctgtcctccacgctgtgtgtgataggggctgaccctccctcctgccgtgtttcccttgcccccagctcatcagggcaccatagaaaaactaggacctcgaagactcaggtccaaatcctggtactatcagttacaagatgtctgacattgaacaagggactttacctctctgagcctcagctccttcatcaaagaatgaggataaacctacataggagatcattggtataaatcccttggcacataggcagttcataaatgatcattctcttcctgccttagcccctggcttccctgcaaccccatgagagaagcagccaggaatgcaggctcggtgggtctaattcctacaggaaaaataaggagtctatttgcctttcatgtccctccccaaatcctctagaaccctgatggtgagtgtaaagcagttaagccattctctccatgccctgcctcccagtcctgcagtttccagctagccctcggtagaggggcacaattcagaggaaactgtgggtctagactctccagggtgaaatggtccagagcttaagcatgcgggtaaaatctgatgtccctgggtctgagcccccaggtctcagtgtgactcctatcacttctagcttaggacgggacctctacagatgaagcttgccagccctcccagattttctctggaatctcccaggatgcatctctgaatctgaacatgagatgatgcagaaggcatgtgccagatactggaaaatcagcacaatgccctttatttatatggcacttatttatttttttattttattttttatttatacagaacttttacaaagttctttcatggatgttatttcattggcactgggtggcaagcctgtgggggaggtatttttaccattttggagatgaggcaaatcaggcccagagaggttaaggaacttagccaaggccacacagctagttagtgaactaataagccagtctttctggctggtaaagagaatgtgtctcccactctgcagtaggtagcagtggccttcctgtcctaaacctgaggtctgatgtccagagtggtgagagagctgggggaggggctcaccatgggatggttgtgttatgtgaggactggatgccccgtgtgctgtgctgtcgacactatttctaacctttgtcatataaacaatgccacatctactcagaaaggaaaagataagaagaaagccaagtatggcagcctgcaggacttgagaaagaataagaaagaactggagtttgagcaaaagctttacaaagagaaagaggaaatgctggagaaggaaaagcagctaaagatcaaccggctggcccaggaggtatgtgtcctgcctgcaggccaggcaagcaaccctgggacacaatgtggtcgttctccatgtgctcccagaggaccagctggagttgttctcctcaaatggcatacaagggtggagtgagccctttcctgctccccagcctggagagagagatcatgccacctgcccagggccatctgaggttagctcctggcttaggaattgaaactaatctccttgcttgggggtgtgagtcttgctcctggctttggaattgaaactagcctccttggtcggggggtgtgagtctgaggttagcctttctgaccagatggtaggtctcaggttagcctttgatacacctggcttagagatttgagtctgtcctcttcactctaccccaccagagtctaaggctgggcctctccatctcaggtgtggctctgaggctacttagagtatggtctgcggctaacccttctgccttgcttgtagctttgaagttaggcttccactgacctgtctacgagtctgaatcactctggcctcccttcccaggttattgtaagaccagacccccccccacccaacttagcttggctctgagaatatgggtctgaggctaacccccttatgcaggtggtaggtgcgaggttatctcccaattaatcaggctatcagtctaaggctgctcccctcaacatagggtgtgtctaaggctagacctcatcaacctgggaatatatctgaggctgtccccatgaagacatgtccaaagcaaccttacaccatgaataattcctatgctaggtgagatgggtaaccttaactccccagctgtaggaggtatcattgtttctgcttctctttaacgcatccatgaatcagaatgccaatttgattagattataaaaccagagaagtcctggaaaatgtgaaatgcattaggtctgacattatgaacaaattagccacaaaattaaaaataagattgaacttatgcttctgagggcaaggcagaatggagcaggaaaaaaaagagtcaagttaaactcttggaatgtgctgggggaggctacaaaaactccattcttggaaaatcataagagcctcagggttcatggggatctgggatccagctaatccctcacaatacataagccccttttctgattttgcctacaagttctgcttagtgaatttgacaccccgccactctcttctcccttgctgctgcctccttgagggccagttggaacaagcccaggtctctttctagatagctgatgcacctcacagtactctggagtttctaaaggagtgctttcatgctatttctatccacatgttattcaaatgtgccctttgtcctctcctttctgcgccgatcctgggtcccaggtgtctgagacagagcgggaagaccttgaagaatcggaaaagattcaatattgggtggagaggctctgtcaaacgcgcctcgagcagatttcctctgctgataatgagatttcagaggtaacagagcccttctttccacatagaccctcctgctgtcttcagaatgacccactgtggggacagcgggaggtgagatgacaactagcaaacgtcactagcctcacagtgcccatccactgtccaggcccacccctaccaccccactcccctcttgaggaggagggatatgtctgtatttctgggtatactcccagagtgatctctaagtcccagctcatctgcgatagtctcagttaggcctgttgtcctggcatcatgactaagagtcccccttacactctcaagggcattccagtttagagaatgaactctgtgaacaccttaccacccacagatggcataacttggggctcttctgcatttgggcactccctaacagcagcctagtatggcctcagctgggcatccaggtggcagaggaatggcgccccatggttctgatgtaagggtggtgggtctccagtagcaagagaaacagattagaagagcatagtgctcgctgtattgtgaagtggagctctaagcagagtgacaattacagaacttccttgcaacacccccagatgaccacagggcccccgcctcccccgccttctgtgtctcccctggccccacccttgagacgcttcgcaggcggactgcacctgcacaccactgacctggacgacatccctttggacatgttctactatccccccaagactccctctgccttgcctgtgatgccccaccctccaccctccaacccaccccacaaggtcccggcgccccctgtccttcccttatctggccatgtgagcgcctcatcctctccatgggtgcagcgcactccaccccccattcccatccctcccccgccatccgttcccacccaagacctcactcccacccgcccactgccctcggcgctggaagaagcactgagcaaccatcccttccgcactggggacacaggcaatccagtggaggactgggaggcaaagaaccacagtgggaagcccactaactcccctgtccctgaacagagcttcccacccaccccaaaggtaatgtccctgttctgcatgctatgtttggaagtaggaagagtggggagaactgctgtttcccatgtcctccactgctcctgagagtggagacagaaagaaacatcatctcaccccattttccaggaatgccccctccgtgtgcatgtgtggacatcctgcatgtatatggtggttctcactgattttgaagtgctgtattgtatggtgaatggcctgggacctttggggtaagcaacggtgtgtccatttgatattcattgctctctcttagctcttctttgctagtgtaggctggtaactttcaatgtaggacttggaagtctatgttaatgaatagccagcactctgtcacatccagtcacttcctgatattatcccagaaagccttgaatatgggaaatggctcctgatttaacgggaaaaaaagggaggggaggaggaagcaggggcgtatttggctctgtaaatgaagtgataacactgtaccatcaaatgcagtattaggacattccagtgccattttctacagtactggccaactgcactggcttgaagtgtaatacccagaaatttctggccaatttccagctatagaaaaaatgaagatgagagagttcctagaaataatttactattaaaagaataggaatgtttttcttggatgttaggaagatgaacagtgtctttctgaaaaagacatatttcttattaattattcgtaatccaaagactattttgaaacatgcaatctctgaggaagacagggagcttggatcccatgaagggaaaaacaaaatattattccactcccgtagccatgaggccaggcttgagtcagtgcaaaggcatctcatgtcagctgagggtagcaggggttgctgagggagggcatagtcaatagcacctgaccagtggtttttattaaccttccctgcatggatttgagttcctgcgtggagagcaggacaagcatctcagagcactcaggagagcttacaaggaaggtgggagtgaagaaagtgccagatgccagcaaggctgaagcttccagcgggagactctcagagggaccctttctggacctctggttggggtcgtgagccctgcagctttgacaggaagaaatctgcctgttctcgggacatctttccccagagcccagccaggagctggtttctagagctgagttagccttgcacaacatttttctctgtaagtggcctccatcaagatgagcagtagcttttcctcaacaaatttgattccactttgattgagtacctgcctggggcctctctctgtgaaggggagaggggagcagtgctgaagaggatgcagaggagattgacatgcctgtgctttccaggactttgccatctgaaggatgagctgctgcccaggcaggcttctgctataaaatatgcataagccatgcgctatgggagggattcattctaactgaagattgaagacacctctgtagagtagagggcttacgagctgagccttgagggatggcaacacatggaggatgggagcaagggcattgcaagtgcagggaacataaagatggcaagttggagtagcagggagttggcctgcctgggtttgaatcctggctgtgccacttactagctaggtaactgaacacatgctacttcatctatctgagcctgggcatccctgtccaaaaataggaatgctaatggcagctacctattcgaatcaaataagttaatacatggacacattctaagttaagaatggcaagagtggcaggcacatcgtggatgttcagtagacattaactatggttattgatagtccagagtaaaagaaaatttgggtgaagctgcaaacctgggatcttagcaatctcagtgtcagcaaaactttgagtcaggatcaagattcaagacagagtccagacttctcagattcttcaaggcatcaccaagttcccactgttagttcctgatcagagcccagggaaggttaaaagccccccaacacaaggagcctctgaagaactggactataaatgtcacaagcgacatcaaagccagggttgtcccagcctcaaaagccagggggctgttgcttggttggcttcatttggcccacctctcacccttgtaccacccaccctcctcctccctgcatgcccctggcaagctgtcatcagtgctgcagcaggaagtgtgagtgaccacacgcccacacagtcagcccagccaccagcaggccccaagtcatggaaacaaacacctgtgttggcttgacacttgtgcctgccacaccagcaccggccataggggggttttcagggccagatctatccacaggcactgtcccatgttctcaccatactatttagtcattcatttattcattcaacacatgcttattgagcacctactatatgccaaggcactatgcagggcactgggaatccctgctggatagacagctgcagtctcccttctcaagacagtctggtggggaacaaagaaaagtaggcacccgccacaccatcagcgtggagacggaggaagcacaggtgctataataaggaagagggctggagtagaggaaaagctcaagggaggcttccagaaggcagtgacgcccaacttaagacctaggaggcaaagcggaagaaggaagagcacgtgcaaaggcctcaaggcaagaaagcctggcattttttgaggctaaagctaggcagtgtgaggagcgtggcgaggagtgagagataaggctgaaaaggaagctagagaagctcatgaaaggccttgggagtcaagccaatgagctcagtagtcaatgcggacactggggagggtttgggggcagggctgtgaactgatttgatacatcttgcccaaaaagatcaagtgggttagagccaagcagacaggttgcgtcagctcccctggatgcctctcttactggtcttcaccccatggcccctagagactatgtgcctaccaactaggaacagcagatgcttcacactgtggtccagggactggaactgtggccaaagagacagcccttaaagacaagggacactggatagcacccatggccactgagagaagggtctgaaagtgtgtctcctgggtgacactggctgctggcacccccaagccaggctctagctcaagcgtccaatttcttagagccgctcagtagtttctgtgatctcagcccacactgtggccaatgggcttctcatctctctgctgaggatcacaaccccaggacctcgagcagttgaatgaccaggctggcttcacatatgcatgggtgtagatttgcatgtgtgtagaagtagcatggctggccttggccaccccaccatgacctcacctgggtccctgttaaactaactccttagacattttgcccaagcccacagcctccacgaggccctggcgtgtccaccatctccaaacctgtcatggtccaccaggagcccaatttcatctacaggccagctgtgaaatctgaagttctggtaagccccttgggtcccctccaggttgtctctagaggagcagaccagggctacctcccctgggctctgctgtctctggagggcaagtgaggtgggacaaaaatgcagatcacagatgccatctcttaaccttcttattggccaagagatgaggccacatgggtgtaagtggatgttgacatgaccagtggaatttctgttccccacttgactgaacagcctggagctctgtctaaaagtaataatgatcgctacgacctgtgaagagcctactatataccaggctctgcatggcctcaattaatcttcacagcaggactgtgagatggttcctgtggtcatcctgtttaacactcgaggaaagggaggtttagagaggttaccagaggggcaccaggttccccaggcagagcctggacttaatacttaccctcatgcctttcatactccaaagcccacgctgttaccctcgttgccatcttgccaaaacctacagagattccaggtgccctggcccctgccctaaggcctgttgtggcctggcatgaaacaccctcagatgggaaactggccagagcaggttcactccctttctccaacttacttctcacctctcactgtgactggaagtctgaggtgtggtcctggggaagtgagaaatgtccgccagtctcagttactgacggctaagggagctgggattcgtgtgcacctcccagaggtgccgaccactggctggcctcccatgcacagtgagaagacagtcatgtcagaattttaacttccctttcaaggaaactctatccaaatgtcagggcaggacagctgagatatttattttgggccttaactgtcccgtcagctccccagagagcaaagtttttgctcctgggacagcctgcggatgcatccatgtcatgttctctggctaatatcaaggggtggtgtctgcttgacaacaactgggtagcatctttgggcattgagcaggcctttaacgtaagccagactgctcggggagggacattggcacggcagccccagactggcaggcccgaagcctggcaccagggggcagccaagacctattggtaacatccaatgtggaacttttttttttttcctctggcagccacaggagatgttgaagaggatggtggtttatcagacagcattcagacaagtaaactgatacccattgtgtgtctggaggtctccccaccacccccgtccctcccactctgtgccacttctttctctctgggagtacctggtcaggtccatggtggccccatctgccaccaagcctcaggccagagctgtgtcctccattgcctgcgcaggggtgggggaggatatcatatcagatggggacccagggcttattagaccccatgcatgagctgagaaacagcagtatccctgggaactcacctcttctgctgctgtttgtccagagaggagcagggcagaaggaaccctcagaggcccacagaggccaagatgggccctcgctccagccctaggagagagggaaggggctgcttaggtgtctccctgtaccttcccctcttcttctccgggcagatcacagcttcaccaaccctgcctgacactgaaccagcgtcagggaggaggtggtggctgaggtcctccctgtgcctagggcactcctgtgcacagggacgtggaagtccttgctggtcctctgagtggcatcaggcaggcagccacctacctccctgcctcctggggtacctccatggagccaaccattggattggctgtttcatcaccaatgaaagaaaccccaggacagagagagatcttgcagccagcccaggcttctccagcctcctcactgataacccaccaacagaccacaagctgatttgactacaggcagggagcagaggggcagtatcaactgtgcagtgagacataggtgttggcaaaagaggctgctcccagcccaaggatttgtcaatttaatctttccagcaaccctgggtggtaagtgctattatcatacccattttatctatgagaaactgaggcagagagatttgaaaatgtgcccacgatggcacagctaatgtcaatccctggatttgaatccaggaggtcggtctctgcagcctgtgctcttaaacactgcaccatcctgccttaaagcactgtcgtcacacaagaggccttccaggacctggcggtttagggcacaaacagccctcacagggagagaagcagggaagtgcagagtctaggctccagaggtggagtcaaacccttgctcccctgcccactgactgggtgaccttgggcgtgaatatcacctctctgggcctcagtttcttcctctgttgaatgaggggttgggctgcctctttaagggccaaccagctgcagtggcttatgagtctctgatctaaattcacacaaaacacaagtacctgccatctggcccatccctgagagctggttctcaggatcatggagcaaggaggccagagccagcactgcccagccttccaggagaaacagccggagtaggcagggccctcaaagtcaaagagcatcgactccacatcctgcccaatgatccttcttgcctgtgcattcactgcaccccctcctctgtctgctgcccacacactgacctggatgtagctcccaagctgagccgagctcatggcctcttggggttgagcctgggtgattgaggcaagtgaggagggatgccaggcagatgcttggggatctgtctgctgatatttggtgctcatcttgtgcccggaacctagttggtgcattctgaggataggggaatctgtagcctccccaccacacagaccatgggccccatgggtcacttggtgtggtctagggacctgcatgctgtgggtggctccactcagtctggcgaggcctgccacggggctctcctctgctcccaccttccatggggaccagccgtggctctgctgcccttgtgcttagcatcctggcccctcagcctggggatgcccctggctcccactcactgtgtgtgactcccgaggaaggccacatagttcagggactacctcactgtgtgttcaggtgccacctcactgtcttgtttctacaccctggagccattgtccccacagcatcccccatcaagccaggtcccctgagctgtgtgtcctcccttctcccctagctaaagggccaacctgcgctccgcagaatctggggaggcctcttaccttctaggtaagcattacatgaggacactgccaggctccaggccaacactgcttctcaacaccacctgctttcttcttgttgtccgtgggctccctccaccatcttgtggctgatttccaggaacagccttctcttgagctggatgggcccctcctgtggggtcagagcactgggtggagacaccttgggcttcatcccccagggcctgggcctgctccagtggagacttggaagagatgaggtggggcctaaaggacttgaggctggggctgagactttcagcaaggcagatgccgcctctccagaccatctagacgtcactggtgcccctgcagcccctgacgcttgtgccgctgaagcagggcagggtcaagatcctctaaagtcttcctcagcctcctgcttgtccctgaacaggggtgccctggctgctagggctgccggcctcctgtctgcatcccgtaccctggccgtgccttctcccgccctacccctcacttctgacccttggattccgaccattcatccccctactcctcggctctgaccctcaagaccctctgctgtgttgccctaaagccctccctttgcttccaggatttccggaaatatgaggaaggctttgacccctactctatggtaagagatgacgcttctctcctggacaagtaaccccaggaacagggcagtgtgggggttagagggtttgatagtggtgcattctgggccttggggtcctgggatgaggtggggcacagaggagccccagtgatgccccagctgctcttcccacgaagattccttccaaagggcactccagtgtgaactgtatggtgcacatgcacgtgtgtgtgtccactgtccccatggggcctgggacccccagttgaagaccagtaggggtggggctgggcacggtccccttgcccatgtgctctgtggggcccagtgtcccataggtgcctggattccccttccagccctaccccaagcgccatccttcaggccagctcaaagcttcccactgtctttttctctctagttcaccccagagcagatcatggggaaggatgtccggctcctacgcatcaagaaggtacctgggcatgtggaggccggtgggccgccatccctctctgtgcctgcccctcctcccttggtctcctgcctctactctcaaggtcactcctgggtggtctctcaggtccccactgtcctcccctctcccacggagacgcccctctgttgtagggccgcatacccaggccccacttggcaccaaggctgcgttttctccagatggcactgccggtgaccccatggcttcttccactcttactgtggctctgtcaagagactccttggtgcccaggtgtccacaggctgctgtctgcttggctccctaaggcctgttttcctctaaccaggagggatccttagacctggccctggaaggcggtgtggactcccccattgggaaggtggtcgtttctgctgtgtatgagcggggagctgctgagcggcatggtgagtggagactagccacacccaggtttggggatgatacagtggttagacggggccctcccggaaagcaaacaggtgaccacttggagtgggctgacggttgctggagaatgccctcccactcgggtccatccatccgactgcctgtccaatccctgggggcatgggatggcgccgggacctgtgagtacacagccaagccagatgccaccgtgccctcagggggtccccagccagggtgggagacggactcagaattgccagatactgaaagtcacagcatggtctgctaagggctgacggggaactcagagtggagggaagccatgggaaccctgaggggcctctaacccaccaagaggagatgggaggccaggagtgctcctcagaggggcgaaccctgagctgagcatagtcaatgtcagcctcgcgaaggggagaaagggctttcgaggaagaggagcagcacgtggaaacccccgaaaccttgcctgtcctttcagtgatggtaggagccgaacgtttggccagaactagccatgtgccagaagctattcatctggtttgcagccctgtgtctgagcgtttcatggatattaactcacttaatcctcacaacaaccctgaaagcaggttctgttattattcttattttacagctgaggaaactgaggctcagagaggttaaagtatttgttcaaggacccacagccaggagaaggtggaggcaggacttgaatccaggcagtttggtcattttgctttactgtccggcacaagtgccacctctgtctgaggtcttctgcagccttgtcccttcccagagggccagaggcccccataccctgtgtctctcttctcattttgccttgttctttatccccttatctacaaaaacaccctctgctgatgagtgaaacctttgcagaccccaggcacagtctcttgcttcaaaccatcaccccgttcacctgtcggacagtgtctgaaaccccaccattggtgatttcttcttccatgtcaaggaagctcctgagtcctttgtggccctttgtggagatgtaggtgcccttggaggaggagccccaggcctcttaccttcccaggccagagtgggggaccctatgagcagatcccttccaggcagtcctaggctggagccaggctgtaccataagctggaggtggtagaatggaggtggtaagaggtaaggggcaggaaacagggatgggaaaggcccttgggggctggcaaccagacctctgtgggttactaaggtgaggtatgggcattgggagccctggatacaagtccagctctgcacccatgaccttggtgacttcacactttaagctttcatttcagccatagaagggggacctgcccagctgggcagctgccccagcccatcagtgcccacccaggccccaccttcttcttctgtcttcatttctctgtcacctggtgacacttctgtgatacctgcctgctgtgtctagcagagagaggggaccaggatggatgggtgactctcctgggtccttcccacttacaaagccccaacccaaccactgccttattgcccctgagactctgtcatggatttgtacaaaatgaaaaggtgaaagtcacccatccccagttgcactgcacagaggcaactgctttctgtggtttggtcctgcactgctttgaacataactagtcactgatgaagcttccctaggagcacgtgtgttttaagccaccatggccaccattgtcagtatcatacaccacattcctatgggccttcatgccacaaggctcctgggtgatctatttcaatgtaacctggagagtgttctgtggacatcaggactgggagaaattcctccaaaaagggctctgatgtcaaagaggtgtggaaaaccacgcacaatctgtctacctcttggaaagctgcagtgcatgttagcacattcaagactgacaaatcctgcagtgagtagctctgttcagcttataactcagctttccccaaaattattagatcccaggcaactctttcaggagcaccttattacagcttcatttattcaacaaatatctactgaggtcctattttgtgtcaggcattatgttaagtgctggggatattatggtgaaccaaaaagacaatccctgcccacgtggagctgacagtgtggtgggagagaccatcagtaaacaaacagattaatgattacgaattgtggaaaatgccaaataagaaaagattgggatgctgtgagagaataggcaagatctacattcgactgagcgggggtcagagaagccccttctgacatttcctctcagacctagaagaagagaaagcaaggtagggaacagcgacatgaagcctctgaggcaggagagagcatggcagctcagggacctgaacagaccagcatgactggcaacagggagggccggctggcagaattgactcaggcctcatactgtgctggaaatgcaggtctgtgtccctctgtaataacagaggctcatcatcaatgatatccaggttctcctgagctggggtgagggggtgtggaagggacagggactaaatgccctttgactagccactaaccaggtggctagtttcccctcatgctttctgagtccacatgagctttcagaacccaggctcaggtctcttctgctgtctggcaatgacccccctttgccaagccctgggccaggcacgtgtcacatacagcccagttggccaatcagcctcatctgcctgcaggtggcattgtgaaaggggacgagatcatggcaatcaacggcaagattgtgacagactacaccctggctgaggctgaggctgccctgcagaaggcctggaatcagggcggggtaagaataaggcccctccctcctttcctccctcacctgcctgcctcaaaccctggcctctgcagccaggtctcacaataggatgcctcattccagggtgggcatctggagtccaggcaacactttggtgacaccataccccatccagcctgtggtttaaatctgacaagatgggattcagaaaaatagatgtcaattcctgaccttggatccaaaaagccagtggcttaaacagactcttgaagccagggcatggcaggtcacccaagaaaaagacttaaggtcttttctaagtgcacactgaacaagaatcaagagaattctgggggctaccagaaagcattaacaaaagcagagaacccaggatgaaggaggggctggtgggaatctgctctgcactcattagacacccacctggatcacggccactgcataagattgcccaggctgtgcactacataatctgagggggtgcccttttacagactgtagtgtgaatggtgcctgctcatggtgtgcaatgcacaacctgtgcaactgtatgcaggcagccgagcctgaggtattaagttcagtgccgaggaagctgaccagatgggcctgggacccacatgaagggatgtggagaagagaagactcacgggtaacatgatgactatctttgattatctgaaggtctgcattagggcagagggagcagaagtgttctctctgattcttgagggaagacctggattggatggagggaagtcctggggaaagagagagagatttcagctcaatattaggaaccagctcatggtagaggggcccagtgatatttccaatacttttcaggggatacacctaagccaaggagggagaatgaggggcaagtcaaggatggcagtaaaagggattcaggtgttaggatcaaaaagctgggccagaagtcccccacttgattgtgcatcagaaagtgcgtcggaattacccagagaggttgttaaaagtactatttcccaggactcacccttgacttctgggggccaagtctacgagcctacacttttaagaagttcccccaagtgattctgaggttgctgcctgtccccggtccatagattgacatttgggagctgagtgtcattcaagggccttgcagccctgtcctctatggtcccgaagcctcagagactagaaacgtcctcagaccatggaagtcacagtgggccccaggtgggcccgtgggaagaaggtgcagcctggctgatcctaggccatggggcccagaaatggggatggagtgccggggcagatgcaccatccaactgagtgtgccccagagtcacacggcttctccccacaggactggatcgaccttgtggttgccgtctgccccccaaaggagtatgacgatgagctgtaagtgtgtgcaagcacctagcctgagacctcttcttccttctccagaatctcagccacctttctccagcccatccccagccttctcccagcctgaaggaatggcccaagcacgcagcttctcatagccagagctcctagaaaactcctggactagagccaagtcattgtccttaagcagtgtctgagctgcctcccgggcagtcttgtccaaattcttctctactatggggaattgaggcatgaggtcttagaccgggtaagcagagacgttgggaaaaagactcaggattgttaattccccactcagaactttatcccctgccccattattagatggttagaaggtgtctgtgtccatccttcactctctggaaggtcttcctgatgtctaactgcattcactcatactgtgcctctaggcagccgggaccacaggcttttgtccccacgctgtgggatctccagggagctttggcctagactgtctctctctgtgattccctgtgtgtctgtctcttgtgtcctgtgggtctctctgtcttctctcctcctccctctctgtctttctttcaccctttccttccttcctgtcaacatcttatctgcccccctccttccccttcatcccggtcccctttctctctcactgtctcctattctttcttcctgtttctcttcatccctgtctctgagtccctgttcctctgtccttgtcattctgcatccattcttacctctttgtctgcctttctctgtttctctgcctctgtgtggtgtctcacctccatcctcacctcatcccatcacctccccagccctcacccacccaccactcacccactcactgaccatgccctgcctccctgtcgtggctgggcctgcttgctccccgtgcccagcagaatctgagctctacacatgtcttggagaaaccagggtctcgcagctcctaattctggaacccaggggctaggcagaacccgaggcaggagcccagtgaaaggagaagccccatggagctctgcctgggagtaaccaagcctgttttgtgtttcttgctctgctctgtatatatagagcttctcttccctcctccgtagctgaaagcccccaaccggtccgaaagctccttgaagaccgtgctgccgtgcacagacacgggttcctcctgcagctggagcccacggtgaataggcaggcgggccacagggccctgtgtgtccctgctgcttgcagtggccatctgctgcccacgctgtcagcaggttctttggactggcgtctggagggtacacaaggcgccatccctgaagtgctgcctggggcctgctgttggccacagtggaattcctcagactcaaagccctcccctcagggaagtggtgcaaagcccagtctgtagtacttgcttgggacccaggtgtcctgactcatcacggccctgggacctgctttgggtcccaagcagcacccaaatgagcaggatgaagccctgggcaacattctctgagggacacagacaatgcctcgaaccaggcatgtggggctgaaggagcccacaggaagcctggctggaattgcccccaagagatgtcctcaacagaatgtgaaaattccccttcctgtgaatgccaacctcctgggagctcttgctccaccatggcccccacacttggccagaaccagggctattaagaggttttgaaggctggtccaaagaaccagggttggtggattagagttgctcatgtcctgttgtgccctgtcatggcctgagccgtgcttagaccaaacggtcttctctgccttctcccttccttggctctgggctctatctgtgggatataccgtggaacccagctgtaggatgtgtttctcaccctgtgatagggatgtgcccgtggacagagctggcaggtggctgtgaaactggtgtttggtgtggcctgaagccacagatggcagcatctggggcagacccaagcctggacttgacttttctgttacaactttcccaaaacattagggcctcatgctcccaagacacttggccgggtagaccatggcttctggggtggcctgcatggccctatgttttctgttacttgccttttgcaaaggactcttgcccctgttcctcccagtctcctccttcccccatcccaggtgtccctcccgctttctccctggcctcctgtgtgctgtggctgtggctggtgtgtagccacttggggcctgcacccagaggggtctccaaagggtggcagggccttgtgctgccagagtgggtactcccccttgtggggccttgctctggctgggctgagtgtgcacccacaaagcctgtatccacctgggctgtttccacttccctgcaggaccttcttctgaagtccaaaaggggaaaccaaattcaccgttaggaaacagtgagctccggccccacctcgtgaacacaaagcctcggatcagccttgagagaggccacactacacacaccagatggcatccttgggacctgaatctatcacccaggaatctcaaactccctttggccctgaaccagggccagataaggaacagctcgggccactcttctgaaggccaacgtggaggaaagggagcagccagccatttgggagaagatctcaaggatccagactctcattcctttcctctggcccagtgaatttggtctctcccagctctgggggactccttccttgaaccctaataagaccccactggagtctctctctctccatccctctcctctgccctctgctctaattgctgccaggattgtcactccaaaccttactctgagctcattaataaaatagatttattttccagcttataggagtgagtgtggatttgggcagcagattcaaggctgcaaatcaaaaaaccataaggtttgtggcccctattcaagggtgatagacagatcccagtgctgtgatctgggtctgacatgaagggtgtgatcaaatggccagggctggcttggagcagaggttgagaaagcaggagatgggctgggctgggcttcaatgtcttctcagcagagatggtaggagatgaagtctgtgtggcagggattttgctcaattccagaaagcagagctgaaggcaggagccccgaagggtcacctcatgatatggggtgcccagcttctttcaagaacgacacagccaccaatgcttctcctgaggtcaccacgacagcatgtgagggaggaagatggcagggtccactccctccgtggaagcacatcccacagaagctcatgggaaatgcaagggcttgaggcaggaaggcataactccgggggcccagcagggggaatgtcacagttcttctggtgacagggaccagggctgctagctctgaggaagagggtggggctgtatcagcacgactcgcctgaccccgtctctgtttccccattccaaattcctgtggtacaatctgatcaggccaaatcacctgagcgggcgacccttgggttagggaccagtcacaggtccaatcagctgtggccgggggtggggtcacatcccacccaacatggctgctgaggcagcaaggaccgtgggcagcaagtcatgatcaccacccctaccagaggatgactatgacatctctcctcccccaccaaaccctgggtatggaaaggaagtggactggggtcccaagggaaggcagtcttagggagagtgcctctgtgtgaggggaccacaggaaaaccccttcctgaggtgggacactgcagagagcccctcggggacacacccactgcccatcccccaggttcagccctatgttcagctgaatcccccacttcatcccacagtg

SEQ ID NO: 95 - RNA, 2237 nt, Homo sapiens
  source 1..2237: mol_type = mRNA
agctccgagggcggctggcccggtcgcggtcgcggctctttccagctcctggcagccgggcacccgaaggaacgggtcgtgcaacgacgcagctggacctggcccagccatggaccgaaaagtggcccgagaattccggcataaggtggattttctgattgaaaatgatgcagagaaggactatctctatgatgtgctgcgaatgtaccaccagaccatggacgtggccgtgctcgtgggagacctgaagctggtcatcaatgaacccagccgtctgcctctgtttgatgccattcggccgctgatcccactgaagcaccaggtggaatatgatcagctgaccccccggcgctccaggaagctgaaggaggtgcgtctggaccgtctgcaccccgaaggcctcggcctgagtgtgcgtggtggcctggagtttggctgtgggctcttcatctcccacctcatcaaaggcggtcaggcagacagcgtcgggctccaggtaggggacgagatcgtccggatcaatggatattccatctcctcctgtacccatgaggaggtcatcaacctcattcgaaccaagaaaactgtgtccatcaaagtgagacacatcggcctgatccccgtgaaaagctctcctgatgagcccctcacttggcagtatgtggatcagtttgtgtcggaatctgggggcgtgcgaggcagcctgggctcccctggaaatcgggaaaacaaggagaagaaggtcttcatcagcctggtaggctcccgaggccttggctgcagcatttccagcggccccatccagaagcctggcatctttatcagccatgtgaaacctggctccctgtctgctgaggtgggattggagataggggaccagattgtcgaagtcaatggcgtcgacttctctaacctggatcacaaggaggctgtaaatgtgctgaagagtagccgcagcctgaccatctccattgtagctgcagctggccgggagctgttcatgacagaccgggagcggctggcagaggcgcggcagcgtgagctgcagcggcaggagcttctcatgcagaagcggctggcgatggagtccaacaagatcctccaggagcagcaggagatggagcggcaaaggagaaaagaaattgcccagaaggcagcagaggaaaatgagagataccggaaggagatggaacagattgtagaggaggaagagaagtttaagaagcaatgggaagaagactggggctcaaaggaacagctactcttgcctaaaaccatcactgctgaggtacacccagtaccccttcgcaagccaaagtatgatcagggagtggaacctgagctcgagcccgcagatgacctggatggaggcacggaggagcagggagagcaggatttccggaaatatgaggaaggctttgacccctactctatgttcaccccagagcagatcatggggaaggatgtccggctcctacgcatcaagaaggagggatccttagacctggccctggaaggcggtgtggactcccccattgggaaggtggtcgtttctgctgtgtatgagcggggagctgctgagcggcatggtggcattgtgaaaggggacgagatcatggcaatcaacggcaagattgtgacagactacaccctggctgaggctgaggctgccctgcagaaggcctggaatcagggcggggactggatcgaccttgtggttgccgtctgccccccaaaggagtatgacgatgagctgaccttcttctgaagtccaaaaggggaaaccaaattcaccgttaggaaacagtgagctccggccccacctcgtgaacacaaagcctcggatcagccttgagagaggccacactacacacaccagatggcatccttgggacctgaatctatcacccaggaatctcaaactccctttggccctgaaccagggccagataaggaacagctcgggccactcttctgaaggccaacgtggaggaaagggagcagccagccatttgggagaagatctcaaggatccagactctcattcctttcctctggcccagtgaatttggtctctcccagctctgggggactccttccttgaaccctaataagaccccactggagtctctctctctccatccctctcctctgccctctgctctaattgctgccaggattgtcactccaaaccttactctgagctcattaataaaatagatttattttccagctta

SEQ ID NO: 96 - RNA, 3246 nt, Homo sapiens
  source 1..3246: mol_type = mRNA
agctccgagggcggctggcccggtcgcggtcgcggctctttccagctcctggcagccgggcacccgaaggaacgggtcgtgcaacgacgcagctggacctggcccagccatggaccgaaaagtggcccgagaattccggcataaggtggattttctgattgaaaatgatgcagagaaggactatctctatgatgtgctgcgaatgtaccaccagaccatggacgtggccgtgctcgtgggagacctgaagctggtcatcaatgaacccagccgtctgcctctgtttgatgccattcggccgctgatcccactgaagcaccaggtggaatatgatcagctgaccccccggcgctccaggaagctgaaggaggtgcgtctggaccgtctgcaccccgaaggcctcggcctgagtgtgcgtggtggcctggagtttggctgtgggctcttcatctcccacctcatcaaaggcggtcaggcagacagcgtcgggctccaggtaggggacgagatcgtccggatcaatggatattccatctcctcctgtacccatgaggaggtcatcaacctcattcgaaccaagaaaactgtgtccatcaaagtgagacacatcggcctgatccccgtgaaaagctctcctgatgagcccctcacttggcagtatgtggatcagtttgtgtcggaatctgggggcgtgcgaggcagcctgggctcccctggaaatcgggaaaacaaggagaagaaggtcttcatcagcctggtaggctcccgaggccttggctgcagcatttccagcggccccatccagaagcctggcatctttatcagccatgtgaaacctggctccctgtctgctgaggtgggattggagataggggaccagattgtcgaagtcaatggcgtcgacttctctaacctggatcacaaggaggctgtaaatgtgctgaagagtagccgcagcctgaccatctccattgtagctgcagctggccgggagctgttcatgacagaccgggagcggctggcagaggcgcggcagcgtgagctgcagcggcaggagcttctcatgcagaagcggctggcgatggagtccaacaagatcctccaggagcagcaggagatggagcggcaaaggagaaaagaaattgcccagaaggcagcagaggaaaatgagagataccggaaggagatggaacagattgtagaggaggaagagaagtttaagaagcaatgggaagaagactggggctcaaaggaacagctactcttgcctaaaaccatcactgctgaggtacacccagtaccccttcgcaagccaaagtcttttggatggttttatcgttacgatggcaaattcccaaccatccggaagaaaggaaaagataagaagaaagccaagtatggcagcctgcaggacttgagaaagaataagaaagaactggagtttgagcaaaagctttacaaagagaaagaggaaatgctggagaaggaaaagcagctaaagatcaaccggctggcccaggaggtgtctgagacagagcgggaagaccttgaagaatcggaaaagattcaatattgggtggagaggctctgtcaaacgcgcctcgagcagatttcctctgctgataatgagatttcagagatgaccacagggcccccgcctcccccgccttctgtgtctcccctggccccacccttgagacgcttcgcaggcggactgcacctgcacaccactgacctggacgacatccctttggacatgttctactatccccccaagactccctctgccttgcctgtgatgccccaccctccaccctccaacccaccccacaaggtcccggcgccccctgtccttcccttatctggccatgtgagcgcctcatcctctccatgggtgcagcgcactccaccccccattcccatccctcccccgccatccgttcccacccaagacctcactcccacccgcccactgccctcggcgctggaagaagcactgagcaaccatcccttccgcactggggacacaggcaatccagtggaggactgggaggcaaagaaccacagtgggaagcccactaactcccctgtccctgaacagagcttcccacccaccccaaagacattttgcccaagcccacagcctccacgaggccctggcgtgtccaccatctccaaacctgtcatggtccaccaggagcccaatttcatctacaggccagctgtgaaatctgaagttctgccacaggagatgttgaagaggatggtggtttatcagacagcattcagacaagatttccggaaatatgaggaaggctttgacccctactctatgttcaccccagagcagatcatggggaaggatgtccggctcctacgcatcaagaaggagggatccttagacctggccctggaaggcggtgtggactcccccattgggaaggtggtcgtttctgctgtgtatgagcggggagctgctgagcggcatggtggcattgtgaaaggggacgagatcatggcaatcaacggcaagattgtgacagactacaccctggctgaggctgaggctgccctgcagaaggcctggaatcagggcggggactggatcgaccttgtggttgccgtctgccccccaaaggagtatgacgatgagctagcttctcttccctcctccgtagctgaaagcccccaaccggtccgaaagctccttgaagaccgtgctgccgtgcacagacacgggttcctcctgcagctggagcccacggaccttcttctgaagtccaaaaggggaaaccaaattcaccgttaggaaacagtgagctccggccccacctcgtgaacacaaagcctcggatcagccttgagagaggccacactacacacaccagatggcatccttgggacctgaatctatcacccaggaatctcaaactccctttggccctgaaccagggccagataaggaacagctcgggccactcttctgaaggccaacgtggaggaaagggagcagccagccatttgggagaagatctcaaggatccagactctcattcctttcctctggcccagtgaatttggtctctcccagctctgggggactccttccttgaaccctaataagaccccactggagtctctctctctccatccctctcctctgccctctgctctaattgctgccaggattgtcactccaaaccttactctgagctcattaataaaatagatttattttccagctta

SEQ ID NO: 97 - DNA, 26174 bp, Homo sapiens
  source 1..26174: mol_type = genomic DNA
agcctcagccctccccccactttcctggctcccagccctgcctacctgaccctctcccttgctttgcgcccacttccctctctttctccccgacccttttgcccacccactctccctccttggctctgccctctagcccagaaggtctgaggcaatgggggcaagcttggagccgacagtgctgagcaggcaggagccaagagaggggaagcttgagcctcacgcagttaggggtgcgctggagagggtggggcccgactccgccacaccccaacggtccttccccctcctcaccactcccgcccccacccccaatggatctgggactgcccctttaagagtagtggcccctcctcccttcagaggaggacctattagagcctttgccccggcgtcggtgactcagtgttcgcgggagcgccgcacctacaccagccaacccagatcccgaggtccgacagcgcccggcccagatccccacgcctgccaggagcaagccgagagccagccggccggcgcactccgactccgagcagtctctgtccttcgacccgagccccgcgccctttccgggacccctgccccgcgggcagcgctgccaacctgccggccatggagaccccgtcccagcggcgcgccacccgcagcggggcgcaggccagctccactccgctgtcgcccacccgcatcacccggctgcaggagaaggaggacctgcaggagctcaatgatcgcttggcggtctacatcgaccgtgtgcgctcgctggaaacggagaacgcagggctgcgccttcgcatcaccgagtctgaagaggtggtcagccgcgaggtgtccggcatcaaggccgcctacgaggccgagctcggggatgcccgcaagacccttgactcagtagccaaggagcgcgcccgcctgcagctggagctgagcaaagtgcgtgaggagtttaaggagctgaaagcgcggtgagttcgcccaggtggctgcgtgcctggcggggagtggagagggcggcgggccggcgcccctggccggccgcaggaagggagtgagagggcctggaggccgataactttgccatagtctcctccctccccggaactgcccccagcgggtgactggcagtgtcaaggggaattgtcaagacaggacagagagggaagtggtggtctctgggagagggtcggggaggatataaggaatggtgggggtatcagggacaagttggggctggggccggcctgaattcggtcagattgggatttgccaactatttggagccggggggaggggcttgagcaaaacagaactagccctgccagctcgaagaactctgggcacccaggacacatcggagtggcagaaagggtcctgttagaactttgttagcgggcttggcactgtgctagctttgcccaagctggctctgaacacatgatgcccactaagacataactctcaagttggcatctgtccagcgtgttggagcgaggtcaggaaggcagggcaatcccccttttccctcccaagggcttggcggtggccccccctcagcatgaccttgtcctgggttctaagggttgggaagttctccctcactctgccactctgcgtgtctgggaccttccttgggctctgacaggcccaccaaaagagctccgggagatgagagatcggctcccccgcagctcccacagcccttggcctgcttggcccaggaatgcaagggagggagggaggcagagggcagaggctcccagctcaggaagttgtgttatgcccaggtctggccgcactcctcccttggccctctgcctagtgtcttcgagggttgggggcactgtccttccctccttggggtgagccactttcattttcccagcggggccaggcagtctttgctcgggcccatcctcttagctgctgacgttttgatctttgtcttattgaagtgctggaatacagtgacatttttgaaatccagccgttggaagattcaggccactcccactttacccacccctgccccaccctaccccaccctactcaactgcaccttcttcttttctaaaaaagcctttgggagcttggaagtataggccctctcttccagccccatcaaaatttgtttcccttcttcctgccttccctttctctatgcagacccaggccaagagcactaagggtgcttggagatccgtaaagggctgttggctttgacttcttctctctcttttatcatctactccaaacttctgctcttcctagaaccctttgctaggtgtggttttgttgcccaggctggagtgcaatggcacaatctcggctcactgcaacctccgcctcccaggttcaagtgattctcctgcctcagcctcccgaatagctgagattacaggcatgtgccaccatgccgggctaattttgtatttctagtagagatggggtttctccatgttcgtcaggctagtcttgaactcccaacctcaggtgatccacccgcctcagcctcccaaagtgctaggattacaggcatgagccaccacgctgggcccatcacccttctttctgaagagtcaatggaagttgtgtgtaggaagacaggcttaacggtttttttttgagacagggtcttactctgtcacccagactggagtgaagtggtgcgatcttggctcaccacaacctctgcctcccaggctcaaaagattctcctgcctcagcctcctgagtagctgggattataagtgtgtgccaccacacatggctatttttttttttttttttttttttaatttttagtagagatggggtttcaccatgttggctaggctggtctcaaactcctgacttcaaatgatccacctgcctcggcctcccaaagtgctgggattacaggtgtgagctaccatgcccggccatcaacctttattttgtttttttgagacggagtcttgctttgttgcccaggctggagtacagtagtgtgacctcaggtcactgcaacctctgcctcccaggttcaagccatgctcctgcctcagcctcccaagtagctgggactataggtgcctgccaccacgcccggctactttttatatttttagtagagacggggtttcaccatgttggccagggtgatctcgaactcctgacctcaagtgatctgcctgcctcagcctcccaaagtgttgggattagagacgggagccactgcgcctggcttctttttttcttgagatagggtttcactctgttacccaggctggagtgcagtggcaaggtcatggctcactgcagcctctacctctctggctcaagccatcctcccgcctcagcctcctgagtagctgggaccacaggcaggcaccaccacccacagctaatgtttttgtattattttgtagagatggggttttgccatgttgcccacagtcttgaactcctgggttcattctgctgaaagagaccacacctgtccttttctttatttttattatatttttcagagacagggccttgccctgttgctcaggctagagtgcaatggtacaatcataacttgctgcagcctggaactcctcctgggctcaagcgatcctaccgtctcaccttccggaatagctgagactaagggcaggcaccaccacgcttggctaatttttttttttttttttttttttttgctttttgtttgtaaagatggaaacttgctatgttgctcagctggttccgaagttttggcctcaagcaatcctcctgcctcggcctccggaagcactgggattacaggcataagccaccaggcctgacgccaggcctgtcttttttctactagtgatatgaacaatttagttagcaagacagataggaagcaaggaaggggagacccagagaattcgttgcattctaaactagtccactcatctaccaaagccctgtgaaggacatttttagcagttttagcagttttctggtcaaaactttgatcgagaaacagattgagtggattcgatattctcttgctcacccagccacgccagtttgtctcctctgcctcctagtgcagctgtccaggcctgggacaccaggcgggtatgtgcgcatgtggggcagggcggaggtggtgtgtgtacttgttatatttagccacctccctctgttctcccccactgatcctggctggaaaggctgggcttccggaaaagagaggtggatttgcacacctggatcccaagctgatagaaagtggggtgaagacaaaggggactcagactggggtgtctgtcctcttctatgcccacagtaggaggagccaggattggttactccctgctgggtctgctgtgctcagagtgaggtagagaagtgggtagagtaaagaatttgggagaggaaaaaaggcattttcccaacccctcccaccaaagcctagagagaaggtgttgtctggtttaatgtttaattagagctcagagttcagggccagatttggagttgggatggaaagttgtttttaagaccctgtagcaatttttgacccagcctgggtacctcaaccacactcaggagtttgggggaccttctgttgggctggattataggctccaagaagaaacccctttcgccaatactctctctctcttctttttttgagacagggtcttgttctgttgcccaggctggggtgcagtggcatgatcacagctcactgcaacgtcagcctcacaggctctggtgattctcccacctcagcctcctgagtagctgggattacaagtgtgtgccaccatgcccagctaattttttttttctttttttttttttgagacggagtcttgttctgttgccaggctggagtgcagtggtgcgatctcggctcattgcaacctccacctcccaggttcaagcgattctcctgcctcagcctcccgagtagctgggactacaggcacatgccatcacgcccagttaatttttgtatttttagtagagttggggtttcaccatgttggccaggatggtcttgatctcttgacctcgtgatccgtccaccttggcctcccaaagtgctgggattacaggtgtgagccaccgtacccggccactaatttttatatattttgtagagatggggtttcaccgtgttgcccaagctggtctcgaactcctaggctcaagtaatccacctgccttggccttggcctcccaaagtgctgggatgtataggcatgagctaccgcacctggtaccccctgccccttctctgtctctttctagtctgtagcccaagggatttggatacccaagtgcaggcagaatgggaaggttgtaagcaccagggaagcctgtctggagtccaggcttgcagctgggccccaccccaggcaaggcagctgggtggatgactcagatgctgcccccctccctcccaccctggtggctttacagaagacagcaggagacagggtggagacagcagttgtcttaaagggaggagtggtggtctgaatgtctacctcttctgcccccctccccattgcatcctggagtcccttgcctggctccttcctgagaccctctggtggtgtctggacacatagctctctctggacaggtaacatgcacaagtaattagaatccagagttgagttcagagttatggattgggctgcaggatagtgccagggtctgtgccttcccatgtgaaactgatggaggaaggctgagtcagaagtggggagatccgaggcccacaaagcagaagcgctacttccactccaaaaaggccctggtgcttgacaacttcctggattgcccactgttgcagccccagtgtggacaggcagggagatgcaggctccagttcatgtaggctctgatcaagacaagaacagcaaaggccacagaggcacagatgcttgtcccatgtcacacaataaaggggtcagcacttgatcacaggccttatgacttccagctgggtgtgctcttaccattaagcctcacttctctagcttgggggacaggttggagggaggatctagagggtgaggtaaggtgaagtcaggtagctgaggctcacttctgcagcctggaaactctgctctggggccagtgacaccttagtgctctatggccatacttcgtggctcatgcctgtaatcccagtgctttgggaggctaaggcaggaggatcacttgaggccaggagtttgagaccagtctgggcaacatagcaagacccccttctgtacaaaaaaattagccggtcaacacctgtagtccagctgcttgggaagctgaggcgggaggatcacctgaagccaggagtttgaggctattgtgagctatgactgcactactgcactctagcctgggagagagaaagaccctgtctctgaaaaagaaaaaaacaaaacaaaactctgctgtcctgcagggcctgttagcatatgatcgatagcctttgctccagcctatacctggacccaggacccctgccagcccctcaatcgtgagacggtcagagctctgggaggctggtgattcttgtcttgagactatcttgagacttgtcatgggaattgtccacccggattgaaaggaagctgtgccttttggcagacccattaggttaatggggttggagacctttgaggatgcatgggccctgggctttatctgagggtatctcctggtgttacctctccaaccctccaccaccaaatccattctttttttttttttttttttttttttgacagtctcgctccctggcccaggctggagtgcagtggcatgatcttggcttactgcaatctccacctcccaggctcaagtgatcctcccacctcagcctcccaagaagctgggactataggcacgtgccacatgctcggctaatttttctatttttagtagagaccaggtttcaccatgttactcaggctggtcttgaactctggggcttaagcagtccacccaccttgacctcccaaagtgctgagagccactgagcctagcccaaatccacgttctgattcaaagggaaagaagaagggtgcagctaaacctggggggtgagaagtacttaaaaagcccaagagaaacaaaagagagaataattcctcactaggaccccctattgccttcccactattggtgcccttgcttggcacttcccctggcctccaggagtctgagacttactcttccatggatgtgcccattgcccccacttccaggtccaccccccagtgattcggtagcttagtgtctgcgctgaagcccaggacagctggatggacaactggtagatcccttcacctaccaactgtgctttctgctcccctcccccttgcttccctcctccccagcccctcgccacccctagcagctgcagcagccaagaccaagtcttcagagacccagacacaagggcagggttcattccattctcacctccttggggtcccagtgtactgataggccgaactctaatattataggagatctctggaagattgcagggtctcttatccctcaataaggggcaaggcaagccgggcgcagtggctcacgcctgtaatcccagcactttgagaagccgaggggaacagatcacttcaggtcaggagttaagagaccagcctggccaacatggtgaaaccctgtctctactaaaaatacaaaaattaaccagaaatcgcttgaacccaggaggcagatgttgcagtgagccgagatcacgccactgcactccagccagggcgacagagcaagattccgtctcaaaaaaataatactaataataaataaataaataaggggcaaggtagtccaccaacaaaatgacaggcagtgtgatatagtggacaccctagccctcggtgcccttagttctgtgtgtggccctttcactaaattgctgtgtgaccttgagcaaatcgcctcccctttctggctttccttagctgtaaaagaaagggattggagcggaaagtctccagagaccttttaggttccaaagtagtacagtgacccacaaagtgagaaaacagtcttctaaaataccaagttattaatagtaaaatcaaatataaataatgtgaatatagttaatagctaatgttgttctcaatagaaatgtttcccacaagctgtggaattaaacatactaccacatttctctatttccccgtgaaagtttgttagaaatggttaaattgtgacattaccctcttggcaaatgttttgttttcattgctactaggaaagggcaactcgttttcgatgcctctcccttctggacggtggaaagggctgtgtcatagagtaggaacgggagatgcggcacaggaatggctcccattgacccgggttgggggctagggcgaaggcctaggagaggcagaactgttaccttagagctggccaggattagagaacagtgcctggaaccggggggaggggcacggtgaccttgggctgcccaccttctacccttccagcacccatactggctcccccaacctgcggctgggctgggaggaggtcttggcccctaccaatcccttaaggaaggggaaagagtttgggaaggggagtcctcccttcacccctgcctcccccaagttgtgagagaggaagccggaatcctgcctgctgaagccaggaataattctggctgagatcccaggcccggcaggggcgctgagtcatggtagagggcagagtggagagtggacaggagaccctaagcttgtccagtcagaaaagcagaggctgaggggtggccttttcttgagaactacattcaagttgcagcaagaaggacagtggtctgaatttgacggggacaaatggaagggagataggacacatgagttcctttaggtctggctcaggggagctagacttcatttcaaggggtctaggttctgggcagttgagaaggaggctatttggggtcaccaaggctcccctttcttcccaaagctctaacactgccaccttctgctggctaggagagagctgtgtcttctgaggctagagctggaatgcagtgagaccagactgcctaggtcctccctcacttcttctcctgaccttggggtgtggctcccactctctcccagtgtcctcagggttaataactatgtgccaccagatagagagttaaggggctgctgaattggcttcttgtgaagggaatcccctaaatgtccctcgttttggtcactggcctccctcccgcccccttcaggacattctactatcttcttaggccatccctccctcctccaggcactacttcttttgctctatccccaagccccacccctgcatttttgtgacaacaccggaatgatttctagagagagaggccaggaagaaggaaagtggcacttggcaggagaccttgcagggggcggctggtgaggaagccagccgcccattgtccaggaccccagtgccctggcctccggcctcaggcttctcctgcctctgtacaatgccacgttgatacgcccagcagctgtgactcaggcctggccccctgccaggcccagcacttctactggagttgcgtctgaacatgtcaacaggcttcctatccctctctcagcaccagttctccccacttcagcccctccctctgcctggaattaaaacctggctttgtcttagggaaggacagctgggagcctagtggctctggtaggggatctgagaggcctcagaccctaggcatatttggctgtttggcaggtgtcacgcccaagggaagcgtgtggaagcagagccatgcctgctgtgggtgcacatgcccgcgtgagggagtcggggtgtttcatcctggggcacctgtgggcttttgaggtgtatgatattcagaacttcacaggttggggtttggggaaggctcaaggggcttctaagtccctggaacagctgcccccctcagttcctctctctctctctctttttttttgagatggagtctcgctctgttgcccaggctagaatgcagtggcgcgatcttggctcactgcaaactccgcctcctgggttcaagtgattctcctgcctcagcctcccaagtagctgggactataggtgcccgccaccatgcctggctaatttttgtatttttagtagaaatggggtttcaccatgctggccaggatggtctcaaactcctgacctcgtgatccacccaccttggcctcccaaagtgctgggattacaggcgtgagccactgcgcccagcctcagttcctctctttaaggtctcctttccagagagggatagcacctcaaatgccagggaggggaattctccacatcctgcccttacccgagttgtggcagacccacagactagccaagaaaccaagcagtggttactttgccgggttgggggggaggtaggggctatcaaacctcatgattggccgcacacaaaggtgtgagtatgtgtatatttgagggtgggtgggagtggcactttcactaggcctccgtatcactctctgactggggtatctcccagcaagcgagacagaggcagacacgcttcccagactgtcttactgggtctctctgtgttattctctgcagtgtctgtgtgtatcgtgccattttctatgttttgcaccaatctgctgtgagtgtcctcaggtgacctgggggcaggtttttagtgcctgagcctacccgtctccaggctttagtttccccctgtaaaagtataggagttggttcaagagaaggttcctctagaagccttgagcctgtgaaccgtctagtctccgggtatttgtgggacacacagaaaaagccccacgacccaacaggtagaacactggctgaaatcagcagggcagagctgagacaggctcaagtaggctgaggggtagggaggttttgggtgaatgggagggagggacagagagaaggaggatatattgcagtaggaggagttgctggaacaaaaggaggggtggtaggagtggcttggggtggcagcagaagacgccctgtcacatggcgggaagtcagcctgggcagaggtctaggtgtccaggaggggctgggtgtggtggctcacgcctgtaatcccaggactttgggaggctgatgcaggaggatcacgtgaggtcaggagttcaagaccagcctggccaacatggcgaaaccctatctctactaaaaatgccaaaaattagctgggtgtggtggcaggcgcctgtaatcccagctactctggaggctgaggcacaagaattgcttgaacctgggaggtggaggttgcagggagccgagatcgcgccactctactctagcctgggcaacacagtgagactctgtctcaaaaataataataataggggctgggcgcggtggctcatgactgtaatcccagcattttgggaggtggaggcgggtggatcacctgaggtcaggagtccgagaccagcctggccaacatggcaaaactccgtctctactaaaaatagaaaaattagctaggcatggtggtgcaggcctgtaatccagctactcgggaggctgagaagcaggagaatcacttgaacctgggaggtgaaggttgcagtgagatcacctgggcgacagaatgagactccacctcaaaataataataatagtaataataataaatgaaaaattttaaaattaaacaattaaaaattttaaattaaaattaaacaaattagatgcccaggaggatacaggagagcatttgccaccaggcggactccctgtacccacccggccacagggggcgatgttcctgggagacaggaaatgcccaggggctgggagaccctctgctcttctgctcccttcctgtgtgctgcctggcaatggggaactctgagggctggtgagcagggctgctgaggagtgggtctaaggagtccctgcagggctgggccagctcctccacctcccctttgtcttcccctcccacttgttatttttagctacagtgtctgtccctcttgcttctcccccagattgggagaggaaacggaggcctctccctccgggcctagcctgttgcccccagcaaccgggcccaaacaggcctgtggccggccctggcttccatatctggcatcagagttgggctgagcagggtgactcagagggtgggtcagcgcctggcccggtgcccacctagcccctttgctgtgctggtgcctttcttccccaaacagccccaagggcccgggcctgctgcagctggggagccggacttccttgtcccaccaggcacagctcttcagacccctgccttgggtcacatttgcaagtgccaactctcatttctaccttattcttttcctctctgttcccctccccaccccctctcttccctctttctgagatcagatttgccagtgatgggaagagttagaaacaggatgcccagcccttctcgcctcaagaggccactgggatgcagccactcctgtgcttggggaacctggaggatgcaagggaaaggactggcactctgctggcacagcacccggcctggggcaggacacgggcgaagccagggtctcccctgtgagcactagaggatttcccgacccctgcccgggtattgtgtgcctgagcatgagtcacctgaggggcccaggttcccacccttcccagctcctctggcctgccccaccctgtcctccctgccaacccagcacggggacggcactcagcgtgtgctcagctttcctgatgccaacccccagtggagtgggctgcaccaccaccctgggaccgaatgcctggctagggtctactttggtccctgctaggtctgaggacccctcctaggaaggaaatggcacttgggggcgggggcagggaggagggaggagagacactgggctctactgtacccctagtcatctcttggggtgtgcgtgtggctccctggccacagagctcccaaggtctgagtcatgagcccatgggtgatagtggcttcttccccgcagatgggagctccccgtgcctaagaaaaccacaaaggttcttcctcacttccctctctgctcgtggtttttctcatctgcagggtgtgtcttagtcctttaatctcctctctttgcagtgctagtcaaaacctccaccagggaaagacaaataacccccttactgtttttttttttttttttttttttttttgagatggagtctcgctctgtcacccatgctgtagtgcagtggcacaatctcggctcactgcaacctccgcctcccaagttcaagtgatcctcctacctcagcctcctcagtagctgggactacaggtgcacaccaccgtacccagctaaattttttttttttttttttgagatagagtctcactctgtcacccaggctggagtacagtggtacaatctcaactcactacaatctccgcctcccaggctcaagcaattctcgtgtctcagcctcccaagttgctgggactatggacgtgcaccaccttgcccgactaatttttgtatttttgatagagtcagagtttcaccatgttggcaggctggtctcgaactcctggcctcaagtgatccacctgccttggcctcccaaagtgctgggattacaggtgtgagccaccacactcagccagcccccttactttccttggagaccatatactgtggcttgtgccaaagtggtacagcatggatttccagctcccctatctacttgctgcgggaccctagatatagctttctgtgcctatttcctcaattgcataggaatagcacctatcgcatagggtagctgtgaagatgacgtgagttaacataatatttagagcagtgcttggtacctaataagctctatataagtgtttgctattatattattattatcactgccaccaccgcttttgcaagcagcagaaggtgaagaggttagactgaagaaaaaacttctgtgctcatcagcccataagctcgcagagcacagggatcatgcatctatgttttcctcagtcagtgtctgccaggcactggcaaggaaaggctgttaccagggggaactccaggaattcctcctggcacctaaggaggctggggagacaggactagggaaaaggtgcccttgagacaccttctgaaatcatcccattgccttccagcttctttcagctcaggctggctggtcagggaaacgctttgtgccatagtgtctgccctcttcctcctcctggcttctccattctctctggaacttgtggcttaggaaagcagtgaggtggaggaggaggaaccctagatcagcagctagaattgactggaatgctgctgctggctttcggtaattgacactgggccattcaccttcctcctttgcacctcagtttcctcatctataaaagggagagggttgagctgaatcaactctaagctccttctagttctctaaattctgagagcctcctagtacagccagcagcagccattagccttcagggtagagaggcctcttctgggaagccccagccagcctgggggtcagcccaaggagctcggaatctaagttgccccagttgcttcactttaccagcggtttttcttcattttccctcctccccctgcagctgcttcagcttcggaaaagttctgaagtcatggaaagttggggctgtgctcccagccaggggctaggccggatggcagccaaaacctgagctgggttttgactttatttttagcttttctgactgagacagaggagggaatacattctccggttctggaaggggctcttttttgcaggagacagacacttacattaaacaacttgttctgaggtgtggccagaggcctggactgagcaagtgtgcaggctgggggagcttcctctggcttctcatgtccttcccctgcccctctgagtgtcactctatcctcctccctgcctggtggggggaggtgggggtgactccttttttggactctcctaagcagaacactgcctgggtctcgtcctccagagcttctgcaaatctagccttccctatccctcttcacagtgaattgctgggcctcttggagtttaggacttttgtggtagaagaaaaatgttggcagggctgcttttctcctttccaggatagatttttccttctgcccacgcttggttttccttttttccatctgctgtggtgggctcatgcttaagcactgatgagttacagatggcagctggaaccaggtcctctggatctttccctccgctccctgggtctgctgctttctctcaccctatatttgtgaagcaattgtaacatctagaaagttcttgggttctctggaggtttttaagaaaataggacctttctatttctccagtccactagcaaaaataatcaggggcccagaaaaggtgagggaggtggcagaggcagcgctgttcgactggttatagctaaagctttacccactttgaggagcagggaggcttaaagctggggcccagatggacctggaggcctgggatccacatctggaaccagatgctgaggctatggtagatgggtagggctcagccttctcccagggcacggatgaggcaggagggagggaggcagggacccctctgttcagtgcagatcagggcacccagactgggtcctgagaaaggaaagggtcaatattgtgcctggtcatccttgtctgaggtccctctgagctctaaccagactttccttccccacagtcccacatgtgtaaaagggactaggagaggtgaccagtacctttggggctcagatcgagaagtgctagggacatgtgggccatgagcttagttgtcaggctcctcagagggagggaagcttggccaaagggaagtgagtagagtccagggagaaggctaagtaaggccctgtgtgggaaggggcaggagacaaaggtacccctgtctctttgggaaagaatgggaggagagagagggaaaagcattcatatcacggggtagagctctgcccttggccccaggcacgttcctgagccctgagtcatgggaagggtggagaagcaggaagggggttttcaaggaccttggggaggtgggagcccagccccagaggcaagcagatgcaaaccaacctaatgcaaggatgccctctcctggtaattgcaggcatagcagcgccagcccccatggctgacctcctgggagcctggcactgtctaggcacacagactccttctcttaaatctactctcccctctcttctttagcaataccaagaaggagggtgacctgatagctgctcaggctcggctgaaggacctggaggctctgctgaactccaaggaggccgcactgagcactgctctcagtgagaagcgcacgctggagggcgagctgcatgatctgcggggccaggtggccaaggtgaggccaccctgcagggcccacccatggccccacctaacacatgtacactcactcttctacctaggccctcccccatgtggtgcctggtctgacctgtcacctgatttcagagccattcacctgtcctagagtcattttacccactgaggtcacatcttatcctaatttggctgccaatgggatctaccacagtgaatttaaaataatccaggaggccgggcatggtggttcacgcctgtaatcccagcactttaggaggccgaggtgggccgatcacgaggtcaggagatcgagatcatcctgactaacatggtgaaaccccgtctctactaaaaatacaaaaaattagcctggcatggtggcgggcgcctgtagtcccaactactcgggaggctgaggcaggagaatggcgtgagcctgcgaggcagagcttgcagtgagctgagatcatgccactgcactccagcctgggcaacagagtgagactccgtctcaaaaaaataataataataataataaaaataatccaggccatgtgtggtggctcatgcctgtaatcccagcattttgggaggccaaggaggcaggattgcttgagtccaggagtttgagaccagcctgggcaacacagaccccatctctagaaaataaaaatttaaagaaattagctgggcatggtggtgtgcacctatagtcccagctacttgggaggctgaggcaggaggatggcttgaacctgagaggtcgaggatacagtgagctgtgattgcaccactgcacttcagcctgggtgacagagggaaaccctgtctctacataaataaatacataaaataaaataatccacaagccatttctacttaactttgcaatgaactgtacctgaccctagatccctcccagtttggccctccggtatacaagggcctcctataggcccttgtgatttctctggggaaaaggaggactggagttgatcatttattgaggccatcagaagcggatggctaattacatatgggacatgtgttaataatgctttgtgtatatagagtggcctttactttcaaaacactcttctccaatttatcatgttaaaagctaggaattgggctgggtgcagtggctcacgcctataatcccagcactttgggaggccaaggcgggtggatcatttgaggtcaggagtttgagaccagtctgaccaacatggttaaactccgtctctactaaaaatacaaaattagccaggcgtggtggcacacacctgtagtcccaacaactacttgtgaggctgaggcaggaaaatcatttgaacccaggatcagaggttgtggtgaactgagattgcaccattgcactccagcctgggcaacaagagcaaaactctatctcaaaaaaaataaaaaatagccaggcacggtggctcatgcctgtaatcctagcactttgggaggcagaggtgggcagatcacctgaggttaggagttcgagactagcctggccaacatggtgaaaccccatctctactacaaatacaaaaattagctaggcatggtggcagccacctgtaatcccagctacttgggaggctgaggcaggagaatcgcttgaacccgggaggtggaggttgcagtgagccaagatcgggtcacagcactccagcctaggcaacagagcgagactccatctcaaaaaaacataaataaataaaaataaaaataaataataaataaaagctaagaatcaaagaagcagtttattcctaatttcacagtctcatctgttcatagtggggccaggattagagtcagtggccaagcttccatcctgggttctttcccttcccaggccctaccatcatagtataccagggaaagacctggagaagccagcaggttgaccaccgaaccaaggctgggccaccttcctcctgggtctggtctccagcctcccagttgtacccttcccccagcccttcctggatgcactgatcagcctgtgcttccttgccctgtttttctttataaatagagccatgttctcctctctctctctctcttttttttttttttttttttgagatggagtcttactctgtcacccaggctggagtgcaatggcacgatctcagctcactgcaacctctgtctcccaggttcaagcaattctcctgcctcagcctcccgagtagctgggattacaggtgcccaccaccatgcccagctactttttggatttttagtagagacagggtttcaccatgttggtcaggctggtcttgaactcctgaccttaggtgttctgcccgcctcagcctcccaaagtgctgggattacaggcgtgagccaccacgcctggcaagacgtgttctctctatgttgttgaggctggtcttgaactcctggctgcaagagatcttcctgcctcagcctcccaatgtgctgggattataggcatgagccaccacacttagcccagcctgtgctttcttaaatgaaaatctaagcatacggctgggtgtggtggctcacgcctgtaatcccagcattttgggaggccaaggtgggcagatcacgaggtcaggagatcgagactatcctggccaacatggtgaaaccctgtctctactaaagatacaaaaattagctgggtgtggtggcccatgtctgtagtcccagctactcgggagactgaggcaggagaatggcatgaacctgggaggcagagcttgcagtgagctgagatcgcgccactgctctccagcctaggtgacagagcgagactccatctcaaaaaaaaaataaaaataaaaaaaagaaaatctaagcgtggtgctcccctgctcaaacatcctcaggttcttttcatggcagataagggcatctcttcatgagccagcccctgcctactgacccagccacctctcccatcccttcccaccccgtacttcaggcttcagcagtactgatctttccaaagaccccagaacacacatgccttcatacctctgtgcctgtacatgcttgtttctgcccttgaaatcatgacagtagctctctgtaggccccgctagcctgtcccttgggtcttagcctcttggaggccttcccagagccccccaaaagtaccccaggcatactttggttccttctctcatgtcccctcagtactttgcacatacctcctttatagcagttgctatgttgtgccagagaagggagtcctgtggctggggggcatatatcttttctttttgagacagagtctagctgtgtcacccaggctggagtgcagtagtgcgatctcggctcactgcaacctccacctcctggattcaagcgattcttgtgcctcagcctcctgagtagctgggactacaggcgtgtgccaccatcatgcctggctacttttttgtattagatatatattttctctcttagcacagtacctaccaagagtgagtgagtagatgtcctgacccctgcaggcatccaaggccctccttccctggacctgtttccacatgtgtgaaggggtgcacaggcagcagcccacctctcagcttccttccagttcttgtgttctgtgaccccttttcctcatctctgcctgcttcctcacagcttgaggcagccctaggtgaggccaagaagcaacttcaggatgagatgctgcggcgggtggatgctgagaacaggctgcagaccatgaaggaggaactggacttccagaagaacatctacagtgaggtggggactgtgctttgcaagccagagggctggggctgggtgatgacagacttgggctgggctaggggggaccagctgtgtgcagagctcgccttcctgagtcccttgccctagtggacagggagttgggggtggccagcactcagctcccaggttaaagtggggctggtagtggctcatggagtagggctgggcagggagccccgcccctgggtcttggcctcccaggaactaattctgattttggtttctgtgtccttcctccaacccttccaggagctgcgtgagaccaagcgccgtcatgagacccgactggtggagattgacaatgggaagcagcgtgagtttgagagccggctggcggatgcgctgcaggaactgcgggcccagcatgaggaccaggtggagcagtataagaaggagctggagaagacttattctgccaaggtgcttgctctcgattggttccctcactgcctctgcccttggcagccctacccttacccacgctgggctatgccttctggggatcaggcagatggtggcagggagctcagggtggcccaggacctggggctgtagcagtgatgcccaactcaggcctgtgcctccacccctcccagtcaccacagtcctaaccctttgtcctcccctccagctggacaatgccaggcagtctgctgagaggaacagcaacctggtgggggctgcccacgaggagctgcagcagtcgcgcatccgcatcgacagcctctctgcccagctcagccagctccagaagcaggtgataccccacctcacccctctctccaggggcctagagtctgggccggatgcaggctggaagcccagggttgggggtgggggtgggggtgggaggttcctgaggaggagagggatgaaaagtgtccccacaaccacagagaagggtcgcaggatgtggagtcagatggcctgtgtgctgtttctgtacactcttacctcaccttcacttctcagggctttggttttcccattcgaaaatggaggctgttcttaatctccctaactcagagttgccacaggactctgcaatgtgaggtgttaaaagcatcagtatttttctagttggctgtgctatttgtgacaggagaaaaagtctagcctcagaacgagaggtttcagttagacaaggggaaggacttcccagttgccagccaagactatgtttagagcttgtgatgttcagagctggctctgatgagggctctggggaagctctgattgcagatcctggagagagtagccaggtgtctcctacaccgacccacgtccctccttccccatacttagggcccttgggagctcaccaaaccctcccaccccccttcagctggcagccaaggaggcgaagcttcgagacctggaggactcactggcccgtgagcgggacaccagccggcggctgctggcggaaaaggagcgggagatggccgagatgcgggcaaggatgcagcagcagctggacgagtaccaggagcttctggacatcaagctggccctggacatggagatccacgcctaccgcaagctcttggagggcgaggaggagaggtgggctggggagacgtcggggaggtgctggcagtgtcctctggccggcaactggccttgactagacccccacttggtctccctctccccaggctacgcctgtcccccagccctacctcgcagcgcagccgtggccgtgcttcctctcactcatcccagacacagggtgggggcagcgtcaccaaaaagcgcaaactggagtccactgagagccgcagcagcttctcacagcacgcacgcactagcgggcgcgtggccgtggaggaggtggatgaggagggcaagtttgtccggctgcgcaacaagtccaatgaggtaggctcctgctcagggtctaaggggatacagctgcatcagggagagagtggcaagacagaaggatggcatgtggagagaggaacatccttgccctcagagggtggaccagggtgagcctgtatatctcctccacactctggttccaggcctggctcctggactctttggctgtgagaccttgagcaggttatttaacctctcagagcatcagtttcctcatctgtaaaatggggatgaatactgatccctaagtctttgagttgtcaggaagatgaaagataaggtatccgtgtgcctggtgctgcgtatgtgtccacagatcatggctattatccccgggggaagggcagtgacaggggtgtgtgtagatggaaggagaggcctcaattgcaggcaggcagagggctgggcctttgagcaagatacacccaagagcctgggtgagcctccccgaccttcctcttccctatcttcccggcaggaccagtccatgggcaattggcagatcaagcgccagaatggagatgatcccttgctgacttaccggttcccaccaaagttcaccctgaaggctgggcaggtggtgacggtgagtggcagggcgcttgggactctggggaggccttgggtggcgatgggagcgctggggtaagtgtccttttctcctctccagatctgggctgcaggagctggggccacccacagcccccctaccgacctggtgtggaaggcacagaacacctggggctgcgggaacagcctgcgtacggctctcatcaactccactggggaagtaagtaggcctgggcctggctgcttgctggacgaggctccccctgatggccaacatcggagccagctgcccccaacccaagtttgccaattcagggcccctttctagagctctctgttgcaggctccagacttctccacccagtaggcaaaccaaaagatgcttcctcaacagcacaaggggtggaagttagacagtgaggattgttaaaggcagagccatactcctacccggagagcttgacagtgtccctctggggtggaaatgagttccttagctccatcaccacagaggacagagtaagcagcaggccggacaaagggcaggccacaagaaaagttgcaggtggtcactggggtagacatgctgtacaacccttccctggccctgacccttggacctggttccatgtccccaccaggaagtggccatgcgcaagctggtgcgctcagtgactgtggttgaggacgacgaggatgaggatggagatgacctgctccatcaccaccacgtgagtggtagccgccgctgaggccgagcctgcactggggccacccagccaggcctgggggcagcctctccccagcctccccgtgccaaaaatcttttcattaaagaatgttttggaactttactcgctggcctggcctttcttctctctcctccctataccttgaacagggaacccaggtgtctgggtgccctactctggtaaggaagggagtgggaactttctgatgccatggaatattcctgtgggagcagtggacaagggtctggatttgtcttctgggaaagggaggggaggacagacgtggggcatgcccgccctgcctctctcccccattcttgttgcatgcatatcctctcatttccctcatttttcctgcaagaatgttctctctcattcctgaccgcccctccactccaattaatagtgcatgcctgctgccctacaagcttgctcccgttctctcttcttttcctcttaagctcagagtagctagaacagagtcagagtcactgctctggttctctgtccccaagtcttcctgagccttctccccttttatgtcttccctctcctcctccgggcccctagcctcccaaacccccattgcccgctggctccttgggcacagaaccacaccttcctgcctggcggctgggagcctgcaggagcctggagcctggttgggcctgagtggtcagtcccagactcgccgtcccgcctgagccttgtctcccttcccagggctcccactgcagcagctcgggggaccccgctgagtacaacctgcgctcgcgcaccgtgctgtgcgggacctgcgggcagcctgccgacaaggcatctgccagcggctcaggagcccaggtgggcggacccatctcctctggctcttctgcctccagtgtcacggtcactcgcagctaccgcagtgtggggggcagtgggggtggcagcttcggggacaatctggtcacccgctcctacctcctgggcaactccagcccccgaacccaggtgagttgtctctgctttgtctccaaatcctgcaggcgggtccctggtcatcgaggggtaggacgaggtggccttgcaggggggagagcctgccttctcttccgcagcccgggggagtgggagcctcctccccacagcctgagtcctagacagcccacctctgcatcctgcccctcttgtctgagccccagactggagggcaggggcagggctggagtgtgagggatgggggagatgctacctcccttctaggggccaggggagggagggtctgggtccaggccctgctgctcacacctctctcctctgttttctctcttagagcccccagaactgcagcatcatgtaatctgggacctgccaggcaggggtgggggtggaggcttcctgcgtcctcctcacctcatgcccaccccctgccctgcacgtcatgggagggggcttgaagccaaagaaaaataaccctttggtttttttcttctgtatttttttttctaagagaagttattttctacagtggttttatactgaaggaaaaacacaagcaaaaaaaaaaaaaagcatctatctcatctatctcaatcctaatttctcctcccttccttttccctgcttccaggaaactccacatctgccttaaaaccaaagagggcttcctctagaagccaagggaaaggggtgcttttatagaggctagcttctgcttttctgccctggctgctgcccccaccccggggaccctgtgacatggtgcctgagaggcaggcatagaggcttctccgccagcctcctctggacggcaggctcactgccaggccagcctccgagagggagagagagagagagaggacagcttgagccgggcccctgggcttggcctgctgtgattccactacacctggctgaggttcctctgcctgccccgcccccagtccccacccctgcccccagccccggggtgagtccattctcccaggtaccagctgcgcttgcttttctgtattttatttagacaagagatgggaatgaggtgggaggtggaagaagggagaagaaaggtgagtttgagctgccttccctagctttagaccctgggtgggctctgtgcagtcactggaggttgaagccaagtggggtgctgggaggagggagagggaggtcactggaaaggggagagcctgctggcacccaccgtggaggaggaaggcaagagggggtggaggggtgtggcagtggttttggcaaacgctaaagagcccttgcctccccatttcccatctgcaccccttctctcctccccaaatcaatacactagttgtttctacccctggctgctgtggtgtctttgttggtggacgtcgctgtgtgtactgaggtgcagactcgtgggcatgcgcgcgcgtacacacacacacacacacacacacacacacacacacacacacacagcgccgcacggtcactgcatcctcctgctcattgctgcccagccctgccctgctccaggggaaacaattagagatcagagcactttgggtgcacatctgggcactcggtggtggctgagggggaaggctttgatataaccatcaccacccactgtacggctctctcccaacggaagtccttcagagaagcagcacctgaaggagggcatttgctaactaacttccctcgtccaccagcacttactgagtgctttctctgtgctgggccctgagcg

SEQ ID NO: 98 - RNA, 3181 nt, Homo sapiens
  source 1..3181: mol_type = mRNA
actcagtgttcgcgggagcgccgcacctacaccagccaacccagatcccgaggtccgacagcgcccggcccagatccccacgcctgccaggagcaagccgagagccagccggccggcgcactccgactccgagcagtctctgtccttcgacccgagccccgcgccctttccgggacccctgccccgcgggcagcgctgccaacctgccggccatggagaccccgtcccagcggcgcgccacccgcagcggggcgcaggccagctccactccgctgtcgcccacccgcatcacccggctgcaggagaaggaggacctgcaggagctcaatgatcgcttggcggtctacatcgaccgtgtgcgctcgctggaaacggagaacgcagggctgcgccttcgcatcaccgagtctgaagaggtggtcagccgcgaggtgtccggcatcaaggccgcctacgaggccgagctcggggatgcccgcaagacccttgactcagtagccaaggagcgcgcccgcctgcagctggagctgagcaaagtgcgtgaggagtttaaggagctgaaagcgcgcaataccaagaaggagggtgacctgatagctgctcaggctcggctgaaggacctggaggctctgctgaactccaaggaggccgcactgagcactgctctcagtgagaagcgcacgctggagggcgagctgcatgatctgcggggccaggtggccaagcttgaggcagccctaggtgaggccaagaagcaacttcaggatgagatgctgcggcgggtggatgctgagaacaggctgcagaccatgaaggaggaactggacttccagaagaacatctacagtgaggagctgcgtgagaccaagcgccgtcatgagacccgactggtggagattgacaatgggaagcagcgtgagtttgagagccggctggcggatgcgctgcaggaactgcgggcccagcatgaggaccaggtggagcagtataagaaggagctggagaagacttattctgccaagctggacaatgccaggcagtctgctgagaggaacagcaacctggtgggggctgcccacgaggagctgcagcagtcgcgcatccgcatcgacagcctctctgcccagctcagccagctccagaagcagctggcagccaaggaggcgaagcttcgagacctggaggactcactggcccgtgagcgggacaccagccggcggctgctggcggaaaaggagcgggagatggccgagatgcgggcaaggatgcagcagcagctggacgagtaccaggagcttctggacatcaagctggccctggacatggagatccacgcctaccgcaagctcttggagggcgaggaggagaggctacgcctgtcccccagccctacctcgcagcgcagccgtggccgtgcttcctctcactcatcccagacacagggtgggggcagcgtcaccaaaaagcgcaaactggagtccactgagagccgcagcagcttctcacagcacgcacgcactagcgggcgcgtggccgtggaggaggtggatgaggagggcaagtttgtccggctgcgcaacaagtccaatgaggaccagtccatgggcaattggcagatcaagcgccagaatggagatgatcccttgctgacttaccggttcccaccaaagttcaccctgaaggctgggcaggtggtgacgatctgggctgcaggagctggggccacccacagcccccctaccgacctggtgtggaaggcacagaacacctggggctgcgggaacagcctgcgtacggctctcatcaactccactggggaagaagtggccatgcgcaagctggtgcgctcagtgactgtggttgaggacgacgaggatgaggatggagatgacctgctccatcaccaccacggctcccactgcagcagctcgggggaccccgctgagtacaacctgcgctcgcgcaccgtgctgtgcgggacctgcgggcagcctgccgacaaggcatctgccagcggctcaggagcccaggtgggcggacccatctcctctggctcttctgcctccagtgtcacggtcactcgcagctaccgcagtgtggggggcagtgggggtggcagcttcggggacaatctggtcacccgctcctacctcctgggcaactccagcccccgaacccagagcccccagaactgcagcatcatgtaatctgggacctgccaggcaggggtgggggtggaggcttcctgcgtcctcctcacctcatgcccaccccctgccctgcacgtcatgggagggggcttgaagccaaagaaaaataaccctttggtttttttcttctgtatttttttttctaagagaagttattttctacagtggttttatactgaaggaaaaacacaagcaaaaaaaaaaaaaagcatctatctcatctatctcaatcctaatttctcctcccttccttttccctgcttccaggaaactccacatctgccttaaaaccaaagagggcttcctctagaagccaagggaaaggggtgcttttatagaggctagcttctgcttttctgccctggctgctgcccccaccccggggaccctgtgacatggtgcctgagaggcaggcatagaggcttctccgccagcctcctctggacggcaggctcactgccaggccagcctccgagagggagagagagagagagaggacagcttgagccgggcccctgggcttggcctgctgtgattccactacacctggctgaggttcctctgcctgccccgcccccagtccccacccctgcccccagccccggggtgagtccattctcccaggtaccagctgcgcttgcttttctgtattttatttagacaagagatgggaatgaggtgggaggtggaagaagggagaagaaaggtgagtttgagctgccttccctagctttagaccctgggtgggctctgtgcagtcactggaggttgaagccaagtggggtgctgggaggagggagagggaggtcactggaaaggggagagcctgctggcacccaccgtggaggaggaaggcaagagggggtggaggggtgtggcagtggttttggcaaacgctaaagagcccttgcctccccatttcccatctgcaccccttctctcctccccaaatcaatacactagttgtttct

SEQ ID NO: 99 - DNA, 233047 bp, Homo sapiens
  source 1..233047: mol_type = genomic DNA
gggtggaagatgagcagaagcccctgttctcggaacgccggctgacaagcggggtgagcgcagccggggcggggacccagcctagcccactggagcagccgggggtggcccgttcccctttaagagcaactgctctaagccaggagccagagattcgagccggcctcgcccagccagccctctccagcgaggggacccacaagcggcgcctcggccctcccgacctttccgagccctctttgcgccctgggcgcacggggccctacacgcgccaagcatgctgagggtcttcatcctctatgccgagaacgtccacacacccgacaccgacatcagcgatgcctactgctccgcggtgtttgcaggtaggaggggccgaccaccctcgcccggggtcggggtggggtagaggaggggacgccgcggctctcaaccctggagagcacctagagctgagagacaggagactttctggccccgccagactgacgttgagtgttgcaacgacacaggtctgcagagggcgactcagagggaaactgaggctggaaggagagaggtgtctgaatggcgcttctcctggaagcttcagcccaggttggtactgaggtaggccaggaaggtgggaccagcatctctcctctcaccttttcgggatctctgaaaagaggtctttctgcgttgccggcggcgaagcgctgtactgcagggctctcctccttctcccctgaaggtctggtcccaggcctatttataacccagctctcttcccgccccgatctgcgcctggctgctttcctggccctttgctctctctcagaggctggcctggcaggctggcagccactggaggcgaaggcaccctacccttgctttgcgcacaggatgggggaaatttagcagctgggcacagctgtcacagcaccaacctttacagactttctctgcccccaacccctgcccccaacggaccagtgggtggagggagcgggggtcgtatctgctttctatcatcagagtgaggcctccttgagcagggaagccactcccttatcagattgggacctcctataggagggccttcatagagttatgacttgacttttcctccaggagctgagggctgggccctggctgctctccaggaacccttcaggaccaagccagagctaggatctacacagctgggtctttgggcttggaaccatactgggggagaagaactagggggaaagagtgtgaacctcccacccagcctgtgggttttcctctcagcctccactacctgccactccccttctccccagagatctgacttctaactacatcccagacttccagaaatcatagcattagttggtttctggccattcagcacagtttcacaagctcctggatacacctgttcacagacaccatctgcacatatgatcccaggcacatgcacaccctggagcgtgtgggacacctgtgatgttccaaggaataaaagctccgaaagcacaggcctgtgtccagctcagcatgagcaagggatcatgtcatgagtaccttctcttgggtatgagattcagggcttctggatttgttggaccagagcagagcttgaggaggagttgctgaatggtcctgaggcctggaaagcagtgtacaccaagagtggggaccaagggggtggctgtggcactccagctgtgctttttttcctaacgtgctgctttgatctgctctcaatcagtttcccacgtggcctccggaaatgagctttatccaggtgtttccagcagggaggacatgggagtctttcatgcttcctctccgcatcctcagctctgggcaggccaggtcagtggccctgttcagcagcctggctgagggctctgggctcctggtgcacaactccagggggcaccattcatactgtaaatagccccttggcggaggggagggaggacaggcactctgtgggtgaagcagcctcctcccacgccagcacctcttccccatttatagcccctgaacctgggggctggtgctccaaatgtacactcagctgcagcagcccctgctgtcaggggctttgtttctggcttccactcagcctgaaccagattttcttccaccttccctgaccacatgccccctctgcacccccatacactcaatacactaggcttctacctcatggtccctcacccaggctaggctcagacctctggttggagaaaggaaagaatgaataataaatggcaggcactttctaaccccagaagtgcaggaagtgctgctggtgtggcttttcttttgttatttcagccccaagggcctgtgtgtggagcagctccccccatcctgcatcctcccatttacacatccctggctgaatcctctccccacccccatctgctttttgcctgctgcctggctcttcggggtaggctccccctttccagggcccagagcacacagctcaccttggggaaaggaagtacattttctgtgccaatccgtcatgagcccctgagcctaggaagagactggctggagcccccacccctggtcatcactgaaaccgccaggcagtcctggggaatgcagtccctcccctcccccagcccctggccacatttcacgtcctgcattagccaagctcctaacccatgtccaaatttggcctccctgtgacattcaggcctgctcgctctccttctccctggcagggtcagcttggtgaatgattacacagaagacttcggtctcagggatgcagctcaaagcaaaacaccagtctgggaagccttccctccccagctgggctgggtctgctcttcccagactctatctgttgtcccataaagcccctcctttggttacatgattataataccctgtagccacacttcacagcccctttgtgcatgtatacattcattgcaagctcacagaagctttgtgaggtagagggcaaagatattatccccccttaaagataaggatattggcccagagaagtgaaggagcctggccaaggtcacatagtggccacagcatccccacccccaacccctcatcagtgccctctgttgttctcagtatccttggtgcatgaataagaaagtgctctggagagcataccatatgctgcccacacccagggcaccagggcactcggacctgagccagccagggagggtggtgcctggggtccccagcaagaagctgagtcagagtagggggagtgcagggctgcaggagcatggtgtgaaacaattgaccaaaagatggaggattctggggtttcaaatgcgtgttcctcacaaacagagggaatggacatttgctaagcacaaaagcataccattgtcaggtggtgtttcttgaaaatcccaccaacagtcctatgaaagagatctatttaactgacaccatgcttattttaaggcagatactgttctaactagaacattaatagaagctacatcatgacccggttataatttgtaccaggtccttatatgtagacatatacacctcagtcctcttagcaagcatatgtggtagcaactgtcatcactcccattctacagataaggaaactgaggcatgaagaggttaagtaagttgcctgaggttatacactggtaagtagtggggttatgatttgagtctaagtatctggctcctgagcccccacaatatccccagctttaaccactctgctatctacctctggctttagcttggatttaccaaagacaagcaagaaaaggtggaggggcaggacctgaacccaggcctggctgagaccctgatgcccccctcggtctgcaccttgactcctctcatcacgtgcgtggtccttactgctgcttgctcacccaagcacagacatcctcagcccttatgttctggtcttgcagatgctttcttatctcagggggtccttgctctctgcctcaccctctctatatctgataggaccaatcagtcaccagttgatgcaggacgctccctccaggcagtgctctcgttccgggcaagctcacagctctgacaggactatggtggctgcctagggtctgataagccaaggccagggcaatggtcacatggcactgaggtgggcaacctgtggtgcgtatggcaggtgctccgggacttccagggagggggtcatgtaactgtagatctcaagcttagccagtctaggagaaagtgaaagttgggcggggggctcagaagagcggctagctggcagcctgagtcacagtccagtgggataacagcatcgaacaagagggagagaaggactgcctgcatcttgaactcgggatcccaggtctgccacttttcaagctatgtggctttgggcaagttacttaaccactctgtgtcagtttccttatctgtaaagtgttgataacaatagcttgtacctgctttggatgaatcattctggagagtttatgtgttagtccatataaagcacttcaaacagccaggcaagcaataaatgttaactataataattattacatatacttttacataaatttattataatcattactattaacatatattgtacatgtactaagaaataattgtacacatccacaaaggctttcaatgtcttttttgcttggtgaattctatcctcagctttgtttctccatccactgtcctgccaggctggacacaacaggccaagtggtgggtggccgtctgtctgcccccagggacactgggcctgtcttctctggctgcccctcctagagcagtcccttctgaggcgaagtcatttggccacctgcctgatggctggcagtggccctcactggggtactttctctttctgggaacaagtattcctctggtgactcactagcagcccacaaacctcttcagtccctctccccaggccaaactcactttctttctctacttcctgcatgctagtctctttccagattggtccactagcatgggatgttagcagagagagcgttcacatctactgtggatgtgctgtgccccaagcactgtgctggagttgctagtgttttgtttaatcctcccaacaccgctgcaaactgtcctcattcttttgattgcacagaagtggaaacagacactgaaaggtccaatcacatgcctcaggtcacaccactaggaaagggtggcctgggacagaagcccaggactgtctgattgtttccactatgcacgatttctcccctgacaggccctaatcatggctgtggtcagaaccaggactgcatgtgggttctaccctcttgctggatacacaggtcccctgtcaattccacctggtggactgggatatccgccggacacatattcttaaatgaatgtgaagggagagggaagaaggcctcatctatacttccggaagcctttggacattgacaaatatgccctgaaggagtcctgtcaactcatgtagaatgttcctctaaaggtcagtgtcactgagcagagaggcaaggtttgtttgcctcctggcaccccatgtttaagtcttgggaaacacaaaggaccagctaacattaggagaatgtggccagaggagaactggcccaactccagcagcaagagatgattagaagcatgccttcctcgatggtcaggaaggtagggccacaaataagtagtgacaggggtcacaaactcatgcacttccagaaacgtggcaggtggactaagatcaagctggaggggaaatcctatgtgcatactgggagtgagctgagggggggacacctggtctacaggtgccagacggtcagtgttaggtggaaaatctaggcccaggtgccacattctctgatttttttcaagagaagctgtaaatccagatttatacggaaaagtcttctaatatttaaggtacaattttgttataaaacattgtactgattaaagacaacatgtctgtgggctggatgtgtcccagagaacaccagtgaccgcttctgagacacagtatttcattcaatcctggagaccttgggcctgggctctctggagggcagagagccagtgtcctctcccttgggctcatcaggcagcacctgtcatcagtgactacaggatggagtgagtgggagagctttagtccccttcccccttaacctctgtcagccccgaaacactgcaataagcatgaaactcagtttccaaacaggcccctcaagcccttccttccaggctatggctcctaagctggccccatcacctttacagtggggctggagtagcctggggtcccgaggagctgccctcacctgaagcctcaggtgggatgcagatctagctatttgtaaacaagccctaactaacattggtataagcatgatggtctctccactcacataatagttgaatgtagacagtcctgactggtaagactctgacccacaggctgtccaggaccccagctcctcctgttttattgctctgttatccccagaagttccctttgacaacgtggtccatgatggcgcacgcctctgtctatattccagccagaggggaaagggggccggggaggcgtgccgcttccctttaaggacatatccaggcagttatatacagcccttctgctcatattctgttggtcatcaattagtctcctggctacattcagctatgagggaggctgggaaatgtttttatttgggtgaccatgtacccaagtaaagtgctgtggaaaatttctgtggatgaaggggagaacatatactgggaggtggaggtcaggtctcagccacactctccattagaacttaattcctgataatgtcccctcgggaggaagccctattgagttactaggcctcagtatgaagtctgcaagggaacagtcagttatctgattagggagaagtccaggtcagtgaacatcagccagactaggaagttggaggctgggatgaaaaggaggcctcaggaagtgtccaggggtcagatcaccagcagttgcttttctgatttgcagaacagatgtggggagacccttttccttggatgcaagccaagggaaggcagaagtcccttggaatgttcctatggaggtattagttataccccctacagatttccatttcctgtggtgactctgaaggactggagctggggtagggtggggtatgataggggcaaaagcaaagccaggaatcattgtgatagacaggaaaaaaaaaaaaaaaagaaaaagaaaaagaaaaaaagctttgtaatatccaaaagtccctctagggggcagtactatcccctttgagaaccactggctgaactcaccagtgggcagaacccacacccgggagccacgtgcagtgtccactataccaatgccaggccagtcctgtactacacgctgggaatacctgggtcactaagacagacttggtctctcccctcgttgaccaactccacagtctagctagacacgaaacgggtgattacgctaatagttattcctgaccattgtgatgcgtgctaagaaggaaaagggctgctgtgcagtcatttgccagagggacccgtctagaccccaggatatcagggactgctttcctggagaggtgatctttaagctgaggcctgaagtatgaataggtggttctgcaaagaaagagaagaaggcagctggaggcagagagaacagcggacctcagagctgagagggagcttggcatattctagaaactgacgaggcaccggagctagagctaggagagcgagaggtggaatggccttgccctttggcccgaggaaatgaatctgggcttcatcccaagagcacaggaggcctttggataaacctcccaagaggcttttagcaggagattgacctgatcatatttaagatcacctggctgcagtgtggataatgggtcagacatagccagagtgatgatgtgatgaggcgactgaccagctaggaggcacctgcagtggcctgggcaggagagggtggtggtaagacttggtggagtcacttggatgctgtgggcacacagatggtaccaaagtcacaggggtcagtaaggatgatttaggctgcaagcaactgaaatcctggcttaaatagacttaaatgagcagagaggcaaggtttgtttgcctcctggacaccccatgtttaagccttgggaaaatcaatttattaaatgctaagtagtcttaaggggatcagctcacttaactggtgtccagagacccagtgagctctgggcatatagactatacaactctgtcacaggatcctaagggtgttgctttttccagctggaaacctctgtggctggtagcacctttgcctgaattttgcttgggcccactgggctccttctgcccactcagcctggcaggctgtgctcagctctcagtaccagccctgatcccacgcctgcgaagggcgagccaggcactgaacagcaaggggtgtgtgagtgagtgcagggtccagccactgcgcacagccaggcatgccagctgtggtggggcaggcagctccaggtgctggtacaggcactggctctgtgccaggctgcggctgggccaggcatactggaaggggcttccactgtggctactggggaatgtggtggtgcccagaagcttggaggcaccaggaactgcagagccccaaagagggtgtcacagccatgtcacccctaggtctgggctccccaaagtgctgaagctttatctcgttctcgttgcctgcaacatggcgagcagggttggggtggggggcaggctgtttcagccttgtttgtcttacagctctttcagtcctgctgttcagtgggtcctgggtccttgtcctatgtccaggaagaataggtacacagacaactggatggtgagcaaggtggagagagcttcactgagtgacagaacagctctcaggaaacccgaagtgggtagttcctttctgcaggcaggtcctcctgataagtgtctagctttcagcagagaggagacccacatagggtagctcgtcaccgcaggcaggtcttcccgacaagtggaggagacctgacctggagtgggtagttccttcctgtacctggtagtcccaacatctgtctgagtctagctgagtcctgggattttatgggctcagaagggaggaagtgtgtgctgtttggtccatgggtgaccaggagcaggctgggggaaaaagcaccataagttctcactctgggctgaggactccacctggaactggcagcccagcccccaggcttcaggccatccctggcttgtaggtggggtttcactgaggacccacccctttctgcccaggagcctgtctgcctcctgctgccatcaacatgtcgtctagggcacctaggctgttcatgcagaggggtgcttgcagttccaggtggagctacccctcagcttccctcctgagcttgtcagtgctcaaagtctggagggggttgaggcagcagggggctggcatctcagtgccaccacaagtgtgcacacatctggctgggttgcaacagcatgtgggcttggacacaactttgctccaccctggagtgggtgactggagttgggagaggccagagatggggcgaaggcacttctgagcctgcaagcttcctgggccccagagagtgcagggatgcctggatctggggccgcagccaaacggctgcagctgtgcctgggagcttggggctcccaccccaccaacttggtagggggcggggctcccacctgttcccagcccccaccggctctgcagagtgcacaacactggccagactctccactgcagcccacgtcttggcagtggccactccagatgggccgctgctgccagcaactccatagtatcatcctgtacccaggcaggctccatgtttctctctgatctgctgtccatgatgtctgctatgtcctcaactggtcagcaattggatctgcaagcttccttatgcacacaaagcaggagagggagttgggcttctctattcatggcatataaatctgtctttccaggggaacaacttaggacacatacctctagctagaccaatagccgttgccaagaaatatgctcagatagagtgggatccatcctggagctggggctgcataactgagcagtcaggttctgctagaagggaagggggtctggatggatgttgagggaatcaaatgtccgcctcatcttgaggggagaagagaagggtagagctgggaggaagcagcaagggtccaagcagctagagaaggcgttgtgatgagaacaggctcagactctcctctctttccttttccccacccccatgctcatcctagctctgtcctttaccgaccttccacttcttgggagctgtagatgtggttgccaccctctgtggtctctaccccttgactggaagctccctgagggcagggatgtgacttattcccagcaagtcagaggtgatgggtgaatgtttattctttcagtccatcatttagaaagaatttatggagaccatgctttgcaccaggtgctgtttcaggcactgaggaaacagcagtggacaaaacagacaaaaacccctggctccttggagcagacattctgatggggaagacagaaaacaattaagacacatgtgctatacagtgattggtgctagagaagaagcctgaaagggagatgaaagagggaaagttgtggtgttcagttgtgtggccgggttggtctcactggagttgatatctgaaggaaaggaagacatgccagccagagggaacagctgacagagaccctggggaggcgctggtctggcctgtctggggaacagctggaaggctagcatgggtcctggggaggtcagagaggtcagccagggctttcaaggtcacgtaaggggagagtggctggagaggaggtcagcgaggtcagccagggctttcaaggtcacgtaaggcctttgagttttgcactgagtgagatgggagccaacggaagactttgagtagaaccaggtcatgagaattgaattgaggatagaccatggggacaagggcagagcaggagacgcattgggagtccatggagtcgattaaatgactcaggcaagggatgacaggcttccactgggggcagttacaatggagatggtgagatatggtgggattttggacatattttgaaggagagtgggagggggatttgcagttttggtgacctggtggggttgaaggtgtcactgggtgggttcaagagagaatggaggagggagattggagacagaaagtatggagagctccttcaaagggcattgttgtgaaaagggagaaatgaccagtagctgaaggggatgtggggtcaacggtgtgctttcttgagagcaataacatcatgcttgtgtgccgatgggatgatccggtaaacaggggaacttggtaaggcaagagagtgagagaatcactgcaggctcaccactgaatgggcgagaggggatggggtctatgcccaagtgtccagttgttaccagtggggagtacgggtgattcatttgtaggaacaggagagaactcacaggatttgggcacagatgccgagggcgggcgttagaaggagactggggacctgaagaagttctctgctccgtaaagaggaagcaaactgagagtgaggttgggcgatggggtgtcctaggggcatccgggagacagggagacaagacatatagtatgattgcccccagcagtgagggctcgcttgagttaagggtcatgactacaaaaggcaccactcaggccggctgtgttactctccaacacagcactggttgggggcaggtgtggaggaggcggagttggattcgccagggttatggcttagccctgtgagaatgctgtatccctcaaaataagagaggggaaagggagttgagattttgcgcagcagtgcgtttaggctgagtgagcaggttggttagtgaggacttgggcggtgggaagacggacagtgccctgacaggggctaggtgctggagtgctgggggatagaagtgcgaagccagggcccctgtgtcaagaagttcatacgctggaaaggaaccagacataataagcgaaacgactgtcaccgttcatggcttacaccttgaacagctttccactgtggagactagggagtgtagagattgttggggatgggggacttgcaggggacagaatgggccgcagctggaccctagttctccagggaacgcagtatgatttgaatacagatctctgcctccagagatgagtgactcgacaccgctgcggagaaggctccgaggagggttggtggggactcgaacctcggagtctctcccgacccgggggtcccagcaaaccagaacggccacctagacagcctgcggacgggagaggaccggctccctggcgcagatcatggggcaggtggagagaggcgagaggcaatgaggcggggggctcggggtgcacggcacgctccgcacactcccccttcagcgctcactcagacttggtttccccgaagacacactctcgtccccgccgctgattgcccactccttccgcctgcactcctgcctccttctcaccctttcgtcgagcgcacagggcggctgccaagtcggcaccggtgcgcaccgggcccgggatccctggctggtgtggagccttggtcaccggaggcccccgcggagcaggccccacggcgccttgtgcgctctcggaggccgagctgcgcgcccgcgtcagcggcgcctcgttcctggccgggagctgggacccgcggagctagggaccagcacccccacaggcgcccgtctgacccctgtccctccccgcccgccgcgggcagggcggatctgggtaggggccggagggggagggtccgcccagcgggtgtccggtgtcctccctgcagcctctcccaggcattggtcacttctccgcggaggagcagcgaaggcgacagctctcttggcgcggctgcctgggagccgggcgcttgctgggtgggtgctcgggcccggtgctcccgctcccgccctgactgcgcgcctgtgtgccgccggggctgcccagccatgctgtgctgcctgctggtgagggccagcaacctccccagtgcgaagaaggaccggcgcagcgaccctgtcgcaagcctgactttccgaggtgagagccccgtggctgccgcgcccatgctcgggtgctacccgactctcggcgctcactggcgggtctgaagcccctgctccggagctaaccctagtccaggccacagtttctccctttgtcagcagggacggaaatcccagccccgacttctgcaggggggcgatgaggaataagcagagcacaataaatgccacagggctttgaaaaattggaaaagcgaaagtgccgtaggtcagcggttatcacttttctaagactgacacccagaggaaataaagtccgagcttttactgggtagtggggataagggtaagttggaagatgggtgcagaaggtagagaggaatcagggcctctgaaaaacggggcgtgtagatgatgtgctttgaaagttgtgtcttttttcattcattcattcattcattcacccatctttatccaacattggctgtattgaatctgccccgtcttaatcagtaggaaaaggaacagaataggatggaaatggccttgacacaaggagttttgaggaatgtcaaggatattttctctaaattcaagaagctaagtccctacatgtagtgcttagaatacatacaggtatttctgtgtggggcagcagagaaatcacacacacactcctcttctcaccaggcgtcctgaaccccctcccccaacccctccaaggcagattcccactggagcgggtgtctcaggaggggaaagggaagaggaaggatctgtcaaaattaagagaaggaacaatagctgtgagtcaggaccccagttctgcagagaaagataaatcaggagaggaaagagggtttccacttagccaggagccataccctgtagctttgtggaatcgataataataataataaaaatctacgtatcagaaaagatagtcaaatgaagaaggaagagtagctggtgttttcataagcctccttcagtgcaggcaccaagggaactcttttcagtctgacccatgatctgaatcatatctccaagcacccccaagataatgatagatgaaagacatgatttggcaaagggagatttatgtgtagcttttattctttgctgtgggacaagttatatgtattcctcttttgaaagatgtgatttgaaacgtttaagaaaatttcactattttcattgattggtgacatgcctgggagttcactatgcaagagcaacttcaagacaaagtctttccttctccagtgtccacctgatgctgcctaaggctttgctatgcagaaattgcggtgtcaccattggctggaaaagaaattccctaaggacactgggcagggcacacattagcatagggctctggatgctctaacactcgtttgggtctgctcacagctctttcccttgtcctgtaacagtcctgtggtggctaccaatgtctccattctgcaaataaggaaattgaaacccagggaagttaaatgtgttcaggtcagtggtcatggcagggagctaccagcgcttggagtgggtattgcccttgagtcgggaagatgaccaaatcccttgaggcccctctttactattgccctcgcccaagtaccccgaacacgtgcagctgctatctccccccagatctctgtattccttctttgtaatgccttactatttatttgcactgatgatctcctcggaaaacagaaataccatacaatagaatgtaacatctccaaccgtttcaagtctatttgtatttcaaagcccagggcaatgccaccttctccaggaggacaccctggatccccctggctctcaagagtctctcctctctggatgacaagcagcagcaccttgctagggatgctagcaccctcgccctgactggcctgtgctcagctccatgcttaggtgccttgagagcagtgacctgtcctatttgttcattggtttgtcccagtgctgagcacaagtaggtgctctctagtgtttgtgcgctttctggcccagcctctagccatcctccaggtgtgcctgggagcttcatttagtctgggacatggtccgctcacttgattgttcctgagaatcacttgtagaacgtgtttgagaaacagattccagagtccccatctgtagaggttccgatgcagcaggtctggaaggtgacctaagaatcagcacttaacaaatacccgatgcaggttattttggaaccgcatcttgggaaaaatgggtctgagatgtgatggcaggtgaaattaatgcgctccccattgcgggagcattcactggggagtttggggctgagttgatgcctaaggagggaaaccgttagaaccaggttcagaacttacagagcatgtaggctggggggactcaactctggctgcaggtcaacattgtgtgtgggagcttcaccaaagaccactgccaacctccctgcctgccttttctgaagccagatcccttccggtggggccccaggcataggtgttgtttctgtcaaatttccaggtgttttgaatgtgcagtcagggttgagaaccactgagcccagctcctcatggcacagatgggacagtggcctgcttgcagagaagccagcctgcactgtgtgtttggctcctacaggcagcctgaaatgtatggggctgggctggccccactttccttgcagttgttccctgtctcggatgtaatttcaggacctgcctcccaaaatagactatgagctctgggaggctggactctgagggcaattttttggcttccctgtctaagcacctctattaatagtagaggctactaatgaatacttctcattcttttgtttttctattaattaattcattaactaaaactaccatgagtaactgggccatagtagatatttttgactgattgtgtcaacgagcagcttaatttcctatagcatttaattgtctgtacttcttttctgccctgcccattttccattccttaatgtgattatttatatccctctattcatgcagttagttcattgaacaaatatttactgagtacctactacgtgcctggtgcttttctaggtgcttggatgcatacaagaacaaaaccagatccctactgctttaaagctgaaacatcttatttccttgaaggccagatctgctgcgtccccacttggtgaatttctgccctgtgtcatcagccaggaacccagaagtcattactgacacttccctctctctcatcctgtcagggcgtctcctcctccagcctccccctcccacctcttctcttcttgatctcctgggggtctctagatttggggcaggagttgggggatcttatagaactagttggaggtggattcctgtcgtcagggaacactcttaactcacctatgtagggaaagtgggctgaaggccccggactctctgaacctagctgtttacatattacaaatgacttaaaatattgaaaacagcggccaggcgtggtggctcacgcctgtaatcccagcaatttgggaggccaaggcgggtggatcatgaggtcaggagatcgagacaatcctggctaacatggtgaaaccctgtctctactaaaaatacaaaaaaaattagccgggtgtggtggtgggtgcctgtagtcccagctactcgggaggctgaggcaggagaatggcatgaacccaggagacggaggttgcagtgagccaagattgagccactgcactccagcctgggtgacagagtgagactccatctcaaaaaaaaaaaaaaaaaaaagaaaagagctttctcttctcttccttctttccttccttccttctttccttccttccttccttccttccttccttccttccttccttccttcattccttccttcttttttttttttgaaatggactttcactcttattacccaggctggagtgcaatggcacgttgtcggctcattgcaaccgccgcctcccaggttcgagtgattctcctgcctcagcctcccgagtagctgggattacaggcacctgcaaccatgcctggctaatttttatttttatttttagtagagatggggtttcaccatgttgcccaggctggtctcaaactcctgacatcagtcaatccacccaccttggcctcccaaagtgcttggattacaggtgtcagccaccccgcctagcctgttttctttttataaacataatatgtacttgctgttaaaaatgacaaactacagaaaggccatgaggcaagagtaaaaaatagccccaaatcctgccactttgaattaacttgttaacaatttgacacatttcctccaagattttttttcttaaaaattttagttataaaatttaacatacaaggaaagtgcagaagatataaatatatgatttaatacagtagttctcaactgggggcagttttttcctcagatgacatttgccaatgtctggagacattttgggttgttgccacaggggttgggggcacagggtgtttatctacagggtagaggctgaggatgctgctagacattccacagtgcaaggggaggtcccccacaccaaccacagagtgattcagcccacatagtaatcatgccacggttgagaataaatatgtgtgtgaagagaataactatgtaatatcacccaggtcaaacaggtcaagaaatagcacctggccagccccatttctccaccagaagtaatcccatcatagattttttttttcccaaatgtttgcacatttgctgaaaaataaaccagggggccgggtgtggtggctcacgcctgtaatcccagcactttgggaggctgaggtgggcggattgcttgaggccaggagttccaggccagccaacagggtgaaaccctgtctctactgaaaaatacaaaaattagccaggcatggtggtgtgtgcctgtaatcccagctacttgaggggcagaggcacaagaatcgcttgaacccaggaggtggaggctgcagtgagccgagatctcaccactgctctccagcctggatgacagaatgagactcagtctcaaaaacatcaattaattaattaaaaaaaaatccagggtcattttttatgtcagtaagtattcttctataacacctttataaatatctgcgtaatattttcttatatggatgcaccatcattaatttactcaaccccctactgatgaatatttaggttatataagtgtttatatttatatccagtgcttaaattatacagtcactgtgaggcatattctggtgactacatctttggccacatatttaattatttcctttgggtaaataccagaagatgaattgctatgtcagaggttatagacagatttaatgcgttgctgcatttcccaaattgttcttgaagtctgtatcaactttatcctcctgtcagccaagtatgagggcttatttttctaataatcctgctaacacacagcattgtcctgtaaatctttgacactttctttcttttttttctttttgacagagtctcattctgtcgcccaggctggagtggagtggcgcgatctcggctcactgcaagctctgcctcccgggttcacgccattctcctgcctcagcctcccaagtagctgggactacaggcgtccaccaccacgccaggctaattttttgtatttttagtagagacggggtttcaccatgttagccaggatggtctggatctcctgacttcgtgatccacccgccttggcctcccaaagtgctgggattacaggcgtgagccaccgcgccaagccaacactttcttaaggttcaaatagtatttgtgatacttcattgttatcacctattcgtatttattcttactgaattactttttcatttgcccatggtggagcatgtttgtctttttcttcattagttgcaagtgctctttatgtattgagaatgttaccgtttttgtcatagatgtttctagtatcttctccagttctgtttgtttttctttaattggcaagtaaaaattatatgtaaatatcttccccagttctaatgtaaatatcttccccaggccttctgagtttaaagactactcttcttgaagtgcatttcaccctggctccctccctttttggccacttctgtggttccagctaggatttaggaaggtggggtggagggtggttgacggggagaggagcagtgctctgctgatgataggggagacagctgcccagttcttggggtgtccaggcctgagaacaccatggcagggcaggtgtcagaatgaccatctacctctgctttttgtttgggggtgtctgtaccaagaggtaatacaggccttccttcagcccacgctagggccatcttttctcctttcacttgctgctgcctttgggttttctgctgattctttgaatttctgtcactttcttggtcttatgtgtattctaatggggccgtcaagaaacgccctgcacaaagtaagccctcaataaatatctgggggataagcaagagtctgcatctaggctgctgcaggatccaaagccccctgcagcttctgagagtaactcctgttgcctgactcatgggcagatgcagctgtctctctgtctctctcactgggagtctgagacaccgcaactcctctccttctctctgtcccctctctaggagggacatccgagactgggagacatcttctgctcctcctgcttcccattcgccaagccgatactggccagtagacctcaggcccaccacctgtgtccattccatttcccacctggacttaaaaaaaattgtggtaaaatgcacataacatgaaatgtaccatcttagccatttttaagtatacagttctgtggcattaatcattgtgcagttatcaccatctccagaacttgtcatcctccccagctgaaactctatacccattgaacactaactccctattcccctccctcaccgcccctggtaattgcagttctactttctgtatgatttttttttttttttttttttttttgagacagagcttttctcttgttgcccaggctggagagcaatggtgtgatcttggctcaccacaacctctgcctcccgggttcgagtgattctcttccctcagcctcccgagtagctgggattacaggcatgtgccaccacgcctggctaattttgtatttttagtagagacagggtttctccatgttggtcaggctggtctggaactcctgacctcaggtgatccacccgcatccacctcccaaagtgctgggattacaggcgtgagcaaccatgcccagccgattttgactaccctaggtacctcatataaatggaatcacacactatttgtctttttgtaactggctgagtcactcagtctagaggaaccctcagggtttcatcatgaatcttacacctgttgctggtccccagttcctcagagcagtttgggaagagggcatggccccctttcctcacccagcataagctgtgagctctcctgtatcttcaacttctgttaaattacatgcataaagccacatctctcaaggcctaaattaataatcaggaacagggcaggccaaaatccatgatgaggaactattttcttaacagtttcctaattatcaatgtgccttcccttttcttggtgcctgtaaatcacgtgattgtgcttagtgaatgtttcgtttctttctttctcctctttggggctgcagcacccatgagtgaccccttccttcatgttacccagagggtcccagagttggcccttctaaccaggacttagtgaaatctcattgagagcttttattctcctcatctacagggaaggtaggaagtggaaaatgattaaaagatatttagcacagggcttggcacacagatatcgctcagttaaggaagcctggagcaccaggaaatgagtttccaagtgtgcaactcatgagaggctgcagatggaattttccatgttactcctgtaggtcacaggaagctgatctgtgataggggaggggaagtggacacgtagcttgcatctcaggccccctcagaaccctgtgcagcagacacttttattatgatccactgattgctgaggagcaaggcctagaggttatgagtcctccctaaggtcacatagtagtggctgttagttgagtgactccaaagcggtgtgtctgactcctgctggagccacaccaatatgggccacacagaattcaaagtggttcagccaggacccttcccccacatggcgcctcctttcttcctccctccgctgacaaacagccacaccatgaatgaagtcttggggcgttccctggaaacagcgcttctatcctcttgtgaggaagtcaacttgcagtcaacgtggaaagaaaaggacccattcattcagcacccgattactggccacctcgctatagactagggttacagttagtaatgtgagtaaggcatggtgtttgccgccagaaactcccagcccagttgggggttcagagctagaagcacactgctacacggctgtcctgcacatgtggtcacagcatggttagggagcaccaaagagagatcagctacctcttttgggagagtcaggggagtcttaccagaggagagacaaccgtgctgggtattgaagagtcagtaggagttcactagatccatcagagtgggcacagaggggagggcaggggaaggaaactcacatgtaatcagcatactatgtgccaggcacctcaacgttctatctcggtaattttcacagcaaccccttgtaaggtagatattatgatgatgaaattgaggcagaaatgttaaatgaatttcctaagagattattttattttttagagacagggtcttgctctgttgcccaggctggagtgcagtggtacgaccacagctcactgcagcctcaaactcctgggctcaagcaaccctcccacctcagcatctcgagtagctgggaccgcaggcacatgcaccactacacctggctaattttgtaaattttttgtagagatggagccccactatattgcccaggttagtcttgaactcctgtcctcaggcgatcctcccacctcagcctcccaaactgctgggattacaagtgtgaggacctcactggcccctaagaagttcttaaagtgttgtacatggaacttggggggatcctcaagactctttgagcaggtcagaaggtcaaaactccttcacaacaacactaagaggctatctgccttttttactgtttggacatttgtactgatggtacaacagcaatggcagctaatactactggcacctgatcactaatcgaggccttggcaggctgggtgtggtggctcacacctgtaatcccagcattttggaaggccgaggtgggcagaccacctgaggtcaggaatttgaggccagcctggccaacatggtcaggctaaaaatacaaaaattagccaagctaggtggtaggcacttgtagtcgcggctactcgggaggctgaggcatgagaatcgcttgaacctgggaggcaggggttgcagtgagccgagatcacaccatcacactccagcctgaatgactggagtgagactccatctcaagaaaaaaaaaaaaaggccttggcactaaattgtgcttcttgttgtgttttttagattgcatgcactcacagttaaaaataaaaaggcagtttcatttaagagtgtccttgatgaagcagtaaaaggattagtttgaatcctcctgtacatgtgttgagaatgttctgtgtgatgaaatgggaagtatgcatagtgcacctctgctgcacatcacaaaatgatgattgtctccaggaaaagcactggagtcactgcttaagtgacaaaccgaactagctgctttttttttttttttccatggaatactgtttttactttaaagaatgactgacaaaactatagttatttgacctgggcattgggcagatattttcttaaaaatgaaagagtgagcctgccatttcaaggaaaatggcttgaaataccacttgctgccaatcaaaaaatttgagcttttcaagcagaaattggagttttagaaaactttgagaagtaacttccagcttcccagtactgaaagtgttactcccccaaaactctgggatttgttcacatggtgaataacaaacgacgttccatgagaatgcaggttttgatcaataggaattttattacttgtcacaagcaggagcactgggacaaagcagtgtctccctgagggaaagtgacaggagggttttatggggcaatggagaggggagagggtgcaacatcgcatgtagaggagggttcccggtggcacagatgctgtgagtcatggtgccagcacataggttgcatgttatggtaatgaagctacaggtctcctggggtgcaggctttagcatggtcatgaggaaagttcattggggttcatctgtaagttgccgggctctgtcaggagctggttttagcccactagatgaccgcctactacacagagcttgaaaaaaacaggctgtaagacagaaagctgtaaagcaggcagattgctcaatctccctacctgcttacagaaggctgatggtgacattaatgtatgagtgtaattttttggtagggcattgtgaaatgtgtcaacatctgggaagatctacgtaactgactgaacaaaaattttccaaatgaccaatgcaactgttacagaatcatacgtgggtgaaagattcattcaaactgcaagatagaacaatgaattttaatgtagcagagtacaaaatgttcattgatctggtttcagatttcacattgcaacttactgttaagaagttaagaactactacttgttgagttttgatgtagtatcaaagaaggatattcacagttatctgaaagtgtattaaaataggcctccctttccaactacatatctggttggattttcttcatagacatcaatcaaaatgaggagtctcagcagtttgaatgctgaggtattaatagatatgagaatccagccaagcattaaagagatttgcaaaaatctaaaagtgtcacttttccttttttgggaagttatagtttttttttttttttgctatatatgtgtcacttatgttaatatttattgggcttattgtgattttaaaattactaaataattatttttaaatgcttcagttataatttctaatgtaaaaattcatagatgcaggccacctaaataaaagctctttggcatcctcaataatttttttttttttttttgaggcagagtctcactctgtcgcccaggctggagtgcagtggtgccatctcggctcactgcaagccccgcctcctgggttcacgccattctcctgcctcagcctcccgagcagctgggactacaggtgccagccaccatgcccggctaattttttgtatttttagtagagatggggtttcaccgtgttagccaggatggtctcaatctcctggtctcgtgatccacccacctcagcctcccagagtgctgggattacaggtgtgagccaccgcgcccggcccaggcatcctcaataatttttaagagtgacatcctgtgaccaaaaagtttgaactgctgccccaaagaatcacaggaaataagtgttttatagtggcctgtgatttcaaatttcatgattttttccatgatcagtgattcacagtgggagagggagtttgggagctcccccctctccctggagggaggtttatcggaatctctgcgggactcactacaacgagcaaatatttacaagataattcccttagaatctccctgagcccctccctgcctccctccctccctcagatggtcttttgctccctctcacgtgctctctttctctttttttctctctcctcttcttcaaatcctccctcaccccttgcctgcctccttgatccctctctgcttccctcctcctcttctccaggctctgaacctggcagggcggggccgaccccacaggaggctgcacctctccaggctggatggactctgatgtgcttggctctaaagcctactggggctcctgggagatgtggccagaggctcgagggactttcgtggtccaggcaggactctctgaaagctgagccatccaggtggagaccaaaggctttccactgagtcttgcacaggttgggtggaatgaggtgatctttaagagccgacccaaataaaagttctgtgtcaggctgaaccctttgaattgtctgttgagcgccccatcgtttcttttcctgatgcttactggaagtgcccagggcactgcagaacaaagcttcattaaatgccttctcttcttctttgggaccttcaacactctttttctgtggatcagtgtcttcatggaagacgtgtctccagacctactgggcttagtgggggaacccctcaccctgacctgtcggtccacatggtgggccgccaagcagagagggccaaagctctgtccaaactccttgttttgtggatcatccagagagagaaatgcacttgccagcccagtaaaggaccaggggctgcagcacctgcctgtttctcccagcctacggctcttccatggaaatgaccttcctgcccactgctgtagaacctaccctaggaggagggtctccttgtgcgtctcctttgccacctttctttcaagcctcacctgcccacctcactggggacaggcacttgccccttcatgcccactgctccagaggaagggcttctgccgtgcatcgtctggggcacagtgggtcagctctcagccatcaaagtgttagttcttcttgtccacctcagagccattctgcattccctcagccagccctcccagccacatagagcttccttgggacagcttgcctcagatggactccttcaaggccttggagggtgaagtggattttgtttaaatggaaataaaattaacatatcataaaattcaccatttgaacaatttccacatatataatttaattggttttaggttgcaatattgtgcaaccatcatcatgatctaattccagaacatttttgtcacctcaagaagaaaccctatacccattaatcaatcacgtccccatttctattttccctttcccttctcttagcccctggaaacaactaatctgctttctgtctctacagatttgcctattctggacatttcttatagatggaatcatataatttctggagatggatgttgttcaaaagaggaatgaaatactttctagggagattgttcattgttagaattagaaggctggatgtggtggctcacatttgtaatcccagcactttgggaggccaaggtgggaggatcgcttgaggccaggagttccagacccgtctgggcaatatagtgaggcccccgtctacacacacacacacacgcacacacacacacatacacaccagcttgatctagtggtgtgtgcctgtggtcccagctactcaagagcctgaggtgagaggatagcttgatcccaggagtttgaggctgcagtgagctatgatctcaccatcgcactccagcctgggcaacagagtgagatgctgtctctaaaaaaaataatactacaatcagaaaatttataattaaaaaaattatttaaaaagtcagaaataacaataacaaactcattaaggagagtcagcctgggtactttcttttgaaagcatgtttctgatgtcccagagctgagagggggaagttgtgtgattggcattggggattcattgcagactggcgggttctcagggaatctgttgattttgtaagatttcccttggcgaccaagctgaagcacaggtctcagaagctgagcctaactcagcggaaggtgaaaggcgggatgtgtctctccattctcccttttgtgtctcttgtaggggtgaagaagagaaccaaagtcatcaagaacagcgtgaaccctgtatggaatgaggtatgtgagtttttctccttccttttctctctgtctgctgcagttgtgtctgcagggacaagttagggggcttgtggaggaggtgccttctcagcagtgtccttgaggtggggaggggctggtggtccagcctgccaacgaaatccttcttgctctaggaacctgggaggagggttggtggcctggcctactaggtaaatggaggggagctagatattttttgtttctgtttccccccagctctggccagccaggtaaagggtgctcagggactctcttgcctgcctgtttctctcacacaggctgttcctttttccttgctcaaagctcaccttctccccacagccctccctgatgaggcaggtcctcctctggctcctgctagcccctgtcccctcaaccagctccctgcatacatggctcccgggtggtcctttggaagccctgctgccttgcatggatggggtcggatgcacaggggagcctttgctctgaggagggtcatgggggcctagccaacatggcactaactcgtgctgcctaccagggcctggcgtctggatgagcccaataatcttggtccttgaggatgcttcagggtcacctggctttttcccagccacactcctggcttggcttcctggggatgggttgaaactgagttgggagaggggcctgtgaaagacctctctcctctcttctgctgtcttcagctcatactgtcacctctgaatttctggatctgtggtcttcatctatccatccatccatccatccatccatccatccatgcttccatccatccattgatccatctgcctatccactagaatcattcatgaatgcctactcagtgccctggtggcacgaaggtgaaccagacacagtctcttctcctagagggccataggttaagatgccttttctctttttcttccagggatttgaatgggacctcaagggcatccccctggaccagggctctgagcttcatgtggtggtcaaagaccatgagacgatggggaggaacaggtaaggtggccagaggggggtgctccatggcttgaaggtgcaggtaggattgtggagtatacagactgcagaatcccaggccccagggagctggggtttcaattagcatttatccacctcctcccatgggactggcccagtgatagatgttgggagaatctggctgtggcttcaggaactcagccatgggtacagctgagcttccaggctacaggggagggaagatgggctggaatcaggtgtccacgcatttgcacagacagtgtgtgccccagggagcaggaagactcgcttcctgctgctccagcccagaggctccctgaggtgggctctctttcccggcccagcccaggccagtgagggcagaggccccctgcaggaggcaggcaggcaggcaaagtgaaactgtagctagcagggagctttccaggaatgcttcatggaaggggtaggactagaggttaagattcgtggtttagaaatcagaacagtaaaaatgagtagcccggcctgggcgcttccctgtgttggggtttctgctgagtttttcatgtacctagtggtgggtttcttggtggggggatcaaagttgtggtggcaaaagcaggctccccctaggcaggcgatgaatcccttctcttgccattgagcccctgggccttgtaaacggaggtggtggggtggacaagttcaacccaacctgcagatgggtgggtcttggactggggctgtgggtggactgggagacatagcacatgaaactgctcatgatgagccttaagcatcagagtgggagtccggttgtccctgctgggcatgagaggaggcagctgcgttagatgccagcaggagtgggttcgtgcttcaagtgccatttacggaggtctaggcccaagcatcagggatgggcttgctgttttgtgacctgctcacaggggagcctttgtttgggaactgggtcagtggtgtctgaggcctgaaagcctggctgtgttgccctggggtggggcagaaggggttggggaggatgagaattcaggaacctagggaagggcaatcagggtctccggctgcaaaacacctggaaaatttgaaatgttaaaaactcagaaaaaaacccaattgccaccttctctctgtggctgtgctggccatgggtgcatggtgtggggagggtggggcactttcactgggcccccaaaagtgtggctgcaaggtgtggggcccaggcctgtgggccagggcatcttgggcccgtctcttccagctgttgacctcagacatctccacctgcacgggggacagggattggaatcatttcagctaccttccaacgcagacactgtggaaggcaaggcagccgctaacaagcatgaatggtggacccgcagatcagggagggagcagccctggacagtgggcagtcctcgaaggcttcctggaggagggtcactcagactgacttgaaggcaggggtaggctttgaaaaggccagaaggggagggtattccagcgtgtggatgtggcgggcagccaggctcaggtctcacaggtgggactcagtctcacgacacgtgcggccctgtgagaagtgggtggtggggaagaattgagaggggggtctccaatgccaggctgaggagaatagcagcaaagtcacacaactgccacacagctgagtgtctggccgcatgctgtcttatatacaagaccttttcccatcagttaggcacgactattgtaactgtcaccgttacagatggggaaactgaggctctgagagattgggcaactttcttgaaggctagtgatggcagagctgtgattggaaggcaggtttttgggacatgctcatagtcactgagccccatgtgcctctcggaggctcctggaagccccaggatggtgttggtctcttctggagagttcagttccctctgacaatgccggcgttgacagagtttagaggggcagaggcaggacagtctggttactgcaggtcatgcagcagaagcacatgtttcattttcattatcttattcagcatttttacaggctctgtggggagatttccctttttttttttttttttttttttttgagacgaagtcttgctctgtggcccaggctggagtgcagtggtgcgatctctgctcactgcaacctccacctcccaggttcaagcgattctcctgcctcagcctccctactagctgggattacaggtgcccaccaccacacctggctaatttttgtatttttagtagagacagggttcctccatgttggccagagcagtcttgaactcctgacctcaggtgatcctcctggctcagcctctcaaagtgctgagattacaggcatgagccaccatgcctggccagagatttcctttaaaaatttttaaaatcattatgggtagataatagttgtatatatctatggggtgcacgtgatgttctgacacaggcataatgtataacaatcaagtcagagtaactggagtatccatcaccacagacatttatcatttcttgtgttagcaacatttcaattctactcttttagttgttttaaaatatacaatagattattgttggctgtagtcaccctattgtgctagggaatactagactcattcattccatctaactgtgtttttgtatccattgaccaccttgctttatccacctctccctgctacccttccctgcctctggattctactctatctccggaagttcaattttttaaaaattagttctctgtagggagatttctaagaccacagaggcaaaatgagagctgtgaacatatttttggccaattcaaggaccaggctagccctcagggtaacggtaagtgagggccacacgcaggctgttctggctctgtggagcagaggtcatatggggaacgggaagcttcgaaccttggggtcctcccattggcccctgtgggtgttctctagctcctgggggcagctagctccctaaaaaccagtgccccatgtgagcagttcactgcagggctgtgtgccagaaatcaggtcctcaaagatcagtttatgggacagccaattcaccaacctcacccgtttaccagaaacacctttcttataacatttaaatgtaatttttgatttttccaaacatttatctcagtttcagatttctagcaattaaaacttgtcttaattaaactagattgaaatgtgcacgtacattcataaatacttgaggactctcagaatatgccaaagcaacactgtcatgagaagaaatgatagaattttggctccatggctgggcattgtggctcatacctgtaatcccagcactttgggaggccgagggcagcagatcacatgaggtcaggagttcgagaccagcctggccaagatggtgaaaccccgtcactactcaaaatacaaaaattcgctgggcgtggtggcgggcacctgtaatcccagctactcaggaggctgagacaggagaatcgcttgaacccgggaagcagaggttgcagtgagccaagatcactggctttgtgccaggagaacatgggatgtgtggcctcctcagctgttttcaggcaggtgcgatgcctcaggggagggagcacaggtacctgcaaggtaattctgtcaccccaccccatgaccagatggcaaagtacttccaccctacacatggatgtgagaaaacaaccaaagacaagcagcaatacaaattccaaaagtgtaaaaagaaaaccataccagggagtaacaagaatgaacgcatgacattttaaattttgaaagaaaaggaaaaaacttcagggaatccagttcaatgagcattttatgtatttatttttgagatggagtcttgctctgttgcccaggctgcagtgcagtggtacgttcttggctcactgcaacctccgcctcctgggttcaagtgattctcccatctcggcctcccaaaatgctgggattacaagcgtgagccaccgcgcccagcccttcaatgagcattttaaattgaagacctcctcactgccctccagtcctgcctgttgggtcaggaagcaaacagggactcaagggttaggtggctgtgccttgcaactgtcctcaggcctctccagttggtgggttccagtgagggtccccggagtcatcatgcagccacccgttttgtttgtgggaatcctgggcgtgtcttctgtgagctcccccgctgtccaacctcatcctcttccaagtgaggggatcacagccctctgcatctgttaaccctctcagtccccctccaccttgcctcccctccctcttccccacctccaccctctggctctctctgcttctagatttcccctcaggcctccctcattctttacagcctgtcactctgtctctgtgtctcctgctttgcttcttttccttcctgtgcccctccttttattctttctctcctccttctcttgcccctcctcgatcctcaccatcctcaccgccactgtcctctctttcctatggctcctggggcatttggcatttctgggttttccctgatgatcactggcagtttagggtgatcttgttaaaccagagtggtctgctggcccagagtgggatctggggaatcctttcatgcctcaggaaggaaatctccatctgggaactgtctctgggctgctcagcatgccattaacccatgagaggggcagccctaagcccgaggacccctgagccaacttcagggatggatcgactttatctggctaaaatcaggtttccaatgcacataaaaggaagctccactccttagggtggaagacactcaggcaaacctagcgggtggtcctgggatcctgttccaggctgcactggacaatttcctgtttactcgaggcttctcagagagaagctgaaggggagatgatccaggtccctgaccagctgttttgacccgtgggatgttcagcccagaagttcccaattcaggccacacaatagaatcacctgggcagcttttacacccactcatgcctgagccttggctgaggttctgatttcgttggtttggggcaaggtctgtgcagcatcacctactctccaggtgctggtgttttcattgcgcagcctgggctgagagccactgatctggactctagaccagcactgcccactagaactttctgagatgatggaaatgttgtctttgtgttgactagtgtgcctgagaaattgaatcttaaattgtatttaattttaatgacttagatttaattaattccacgtggctagtggctactgtgttggacagagcagctttagatttttggaacagtgtttccaacctggctgcatctagaaatgacctgggagcttaaaaaaaaaataagtgtctgagctccgcactaagctgattaaacaagaacctctggagtgggctgcaggagtcagcacttttggaaaccacccaggatggcaggggggcagtgtgcccgcagggtagagaactcactgtgttagagagatgctggcattttgttgttgttgttgtttaggcagagtctcgctctgtcgcccaggaaggaatgcagtggcatgatctcggctcactgcaacctctgcctcacaggttcaagcgattctcctgtctcagcctcccgagtagctgggattacaggtgcccaccatctcacctggctagtttttgtgtttttagtagagacagggtttcaccctgttggtcaggctggtcttgaactcctgacctcaggtgatctacctgccttggcttcccaaagtgctgggattacaggtgtgagccactgtgcctggtctgatgctggcacttctgaaaggaattgctctcaatttttccatggattagctaagaaataaatagaaatggtcattcttgtaattgtttatgtatgtgattattggcaaaataatcaccatcaagtaataatggctgaaactgcacatggtaaaattgttacagaactgaaaaacagatggaagaatcctgttggtaactgcaaacactgacttgggaagttggacttagtggaaataattccacaaaagaaaactcaaaatggcaaggagcaatatttgataaaacttaatgtcaaccaaaaaaaaaaattaaaaatctgtgagccaaatctgtgttgggaaatttaagcagggattaattgtccccaatgaaaagaattttggtaaaatgaaaataaagatggtaaaagagaaaaagaaaacagtttaattgctctgtatgcaaaacatatcaacacattaaactggcttcatttaatttgttctggaaaaatgccttctcagtggaaattaattactgtaggtgttttttatatttaaatgtttggtaaatataaacatggaagcaaaaatctccatggggtcaaaacatccacctggcaaagcaccatggtcaaaatgatgctcaccttgactgcagtgattcactaaccccaggcctaaccggtccccaagacagggggcccagatgcaacaaggaagcatacagaacaacctgttaaatgaggaggtctcaaataccacaggcgacaccttatattaaggcattaatcatcgtttctctgagatacagacttgagtgggctccctgtgtttttcctggtcactctaccctccagcctgaccgtgtccccagcctctctgctttaatcaagtgttataggaggaggtctagtcaggattgcctttaaagacgctctcttaggtgttcacagtggcattttctttggaatagtgtgatctactctgtatcttttagcgacctggtgactctgtaaagtgggcactgaggggcctctcacctgcactcagatgcctttctgccttcacccttccccatggtctgagcatcagtcatggtgcctgcaactggaggggacccaggagacaacctgagaactttcctgagccccaatgctccttctcctccttcctccttcagctgctcctcctcccacccccacattgagctggatgatctgccccagtggaataagcgtggactttgagaagagccagggtctagctgcaacactctgtggccttgggcagatcactacactccctgaaccttgctttcttccattcttagggagtatcaaatcaagggacctgccacaacgggggtctccctaaatgttagttctgcactgctgccttgctcttgttcccccgtgcttccttctgctgcccccaccactcaaagtcccactgacccagccctctcccaccaaaggctgctcttagccagctgtgggttgaaaaagcaccaaatcatatgaatgcataggtggcagcctatggcttcatgtttcactctattttaggaatcggcgggatgctgctttatagctcagactctgcttagaaaagagagaagtgttaatggtaggtgtccagccactgcagtagattatgaggagatattttaggaatggtgtatcttcttcctgacatagggccatctctgagcctggccttggtgccatctgggcggaggcaagggtggcctgatgcctcctatgtcaatgagtttcatttgttgagggaatgtggaggtttccaggaaggggctgaacatgctcttagttcttcagggtagccatgcatgggagacgacagaggcgcctggggagggggcctggccagttgaggcctgtctcccacacctggagtatgctggtgggattgaggggctctgtactgggaggggcaggtattctaattctcaggctgtccatcagagcttgcagggcaggggtggtggaatgagaatgagggtcaggggctttgctcagggaccccactgtcagcagagttctatcctggcactgtctgtaacctggacctctctgaaaccgtttcctcatcaggacaatggcaaaagcagtccctatgttgccaggttgctgtgaaatttaaataatataatgcatgtgtgtcaaatgcctgctcagtgcttggaatactgaaggtgcaatatatgggggctgttgggagcaggatccatatagatgcacttacgtaaaccacacaaacatgtgaacactatgtgcatggcccgtatggacacccggctgtacctgagtgtgcactagcattgcataatatgtgcacatgcatttttttaaatttaaaacaaccaaaaaatttcacggaagtataaaaaaacctaagtaatttttataagtataaaagtgcatttcattctcaaaaagttataaaggaaaaagtacaagttctcccatcttctacccatgaatttcttctcttttctccagaggtgcccattgttaacgatttggtgcgtatctttctttcttttttgagacagagtttcgctctcgttgcccaggctggagtgcaatggcacgatctcagctcactgcaacctccgcctcccgggttcaagtgattctcctgcctcagcttccggagtagctgggattacaggtgcccgccaccacgcccagctgatttttgtatttgtagtcaccatgttggccaggctggtcttggactcctgacctcaggtgatccgcctgcctcggccttccaaagtgttgggattacaggcgtgagccactgcgcccggcctggtgcatatctttctggacttttcctaagttatctacaggcatctgtttatacacatgcatactcatttacttatacaaaaatggaattatgctatatgtattggtctgcactttgcttttatcacttcatcattgactctttcccaggtcagtccatcacatttttaaatggttatgtggtattccgcggtatgtgtgcaccgtaatttaccccactgtactctcattgactgatatttagtttctttccaatgtcttgctctcgaatgattatccagtaaacatctttatccaaatatttttatgttcttatgctatttttttctttaggataggtcgttagaagtgggattactagatcaaagggtataagcaaataacattttttgtagattctgccaaattacttttcaaaaatgttgtcccaattaatgtccaccaacaatgcaataaagtgcctgctaatttatttttgctagtagaacggaccaaaaaaagttgtaatttgtgtttccttggccatttgtaaagttgagcatcttttgtgtgctgattgtccatttctatttcttcttttgtgattgccaatcattgtattttgggttgctcgtcttttccttttaattcataataattacatatatttggaatattattaggaatactaaccctcactctgttctatctgtataaaacttttttctctctgcttctcacctgtcagttgcactcacatggcaacaggcatttacccagaggtgcacgtgtgcacacagacctttatttgtttgttttaaatttttaagttcagggtacaggtgcaggtttcttacataggtaaacttgtgtcatgggagtttgttgtacagattatttcctcacccaggcattaagcctaggacccattggttatttttcctgatcttctccctcctcccaccctccaccctctgaaaggtcccagtgtgtgtcctcctctatgtgcccatgtgttctcatcatttagctcccacttataagtgagaacatttgggatttggttgtctgttcctgggttagtttgctaaggattatggcctccagctccatccatgttcctgcaaaggacatgatctcattctttttcatggctgcatagtattccagggtgtatatgtatcacgttttctttatccagtctatcatcgatgggcatttaggttgattctatgtctttactattgtgaatagtgctgcaatgaacatacatagcacacagacctttataaaggcagagtggcggtttgctgtgttagaagttgggaaaaggcataggcttggcctctggttttagcaagctggtttgccagcccccgcttctggcatgcttgggaggctgttttgggcaggattatttacccttcactgcctcattgttttcagcgggcccgaaagcattgaccatatccttattttcaaggatttttatgactatattttgccctggattctatccaggacatccctggctttcagaatcatttttcttttgtctttctctagactgaagtggaaaactatttagagttacccttgggcaggccctggggaatcagatactggccggaaggctgccagaggccaggggactcaggggctctggaatgtcctgctgttccctgtttcctgcccctcactgcctggcacgcatagcggagagctggaggggctcagaggacaggtgtttcctcccctgtatggcatgtgtctccttccaggacagggctctctcactttcctgtcacctggctcattgacgctaaccagggggagatacagtgagtcagtgatgagttactcgcaatacatatatagttttaattggcatgcgcttttcttcatttcaaagaaagaatgagaaatggatacatggtaacccttctggaacattttttttaattcaaatttaaagttgtaaaaatagtacaagaacatccatatattctttactcagatatacttattcacattttactccattagttttagtatatatgttttattatacttattattattatctcccttcctcccccccccccttttctttctctcgtctctcccttcttgtttctccctctttctcttactcctatttgaaggtaagtcatattcatcacggtctttgactcctaaatatttcagtgtatatttcttaagagtagggacacagttatcaacttcagtaaatttaacacgatgccatacttttttgtttgtttgtttgtttttgagacagggcctcactctgttgtccaggctggagtgcagtgctttgaacaaggctcactgtagccttgacttcctgggctcaatccatcctcctacctcagccttccaagtagctgggaccacaggcacaagccacctcgtctggctaatttaatatatatattttttttgtagagacagggtctcactatgttgtccaggctggtcttgaactcctaggatcaagggatcctcctgcctcagcctcctaaagtggtgggattacaggagggagctacagcacctggctgataccatacttttatctaatatattgtttgtattccagtcatgttaatggatgaaataatgtttttcatttcatagcaatttccctttccctctcccccagtgcgggattcagcctgtggtccatattgaatttagtcatgtttctatagcctcctttaatctggaacgtttccttagtctttgtctttcatgacaatttacagttttgaataatatagtatcccttttttctaatagaatgttcctcatttgggatgtcagcctaaataacgaacagagaaaaaagatatttgtgagggaatagagccagccgtgggaatatgcatgccatagtaaaccacatgagtatttaaggaggtaaagaaacacaaaggttttcagctgggtgcgctggctcacgcctgtaataccagcactttgggaggccaaggtgggtggatcatttgaggtcaggagttcaagaccagcctggccaacatggtgaaaccccgtcactactcaaaatacaaaaattagccaggcatgatggcatgcgcctgtagtcccagctacccgggaggctgaggcaggagaattgcttgaacccaggaggtggaggttgcagtgagctgagatcgtgccactgcactacagcctgggtgatagagtgatactctgtctcaaaaaaaaaaaaaaaaaaaaaaagaaagaaagaaacacaaaggttttttagaggaaaagaggaaaataatgaggattacataattattttgaaatattatccttggctataaaaatcaattacaagggtgattctggtccagggttggactggtaattagtgggcagatgttcttgcagaagtgttttttgagtaaggctgttatagcctttgtgcaagactgtgtttttgcagtcttttgtgagggtttttgttatcaggcatacaagcatgagaaccctctcttcatggccttccttagctctttttgttagggttttcttaacattagcgactccatttttattctgacaactttcgtggcagtttgtttgatgttttctcatgcttagattcaagcttggattaggttactcatccctggccagaacactgtctaagtgatgctgtgtctgtctccggatctggaggcacatgatgttccttactggggaacgttaatttcaatcacctggtcaaggtgttgtctgatttttccattgcatatttaaagttcttttctcccccttgaagtttgttaagatgtacttgaagatggtgcaaatatcctgcttctcaagaagatgtccccctaaacttagcatccatggatgatccttgcctgatccaatccttaccatgatgggtatgagctgattttcatctccagcactccttccacatgtaccaggctaggctgtgtgaggctcttgtggtcacagtggtgctggcataaccccagggccaccacgcattgatccctacctgtgcctagcactgtgccttggtgactcatgccttgagcctcaccccttggctcagggccattctctcagagttgaaagacctctgggtcattaggttgggtgtctcatctcttccatccttgatagacagtgttggagtgagacagacacccattctggggctggattattcattagaaagtccttccttctattggctacagtttttctccctgacattttgaggatcttatttctctaccctcaggaatgatcaaaaagaaatctaaccctcttgcatatgacagcacttcaagtcatggtctaatatggtgctgacagtcactgggtgggatgggaatgtgcagagaagcacaggaacatggtgagtggggaggggaagaagggaactgacacctaccaagttctatctaggttccaggcacatgtggggggtgataggtgtattaactgaaattttaccagaactctctgaagtattcattatttcctccaagctccaacaatgcagggtgggttgtccattttattctcatcagtatccccagtacctacaaccgtacctgacccatgagtggtgctcactacatatttgttgaatgaatgaatgaatgacttttacagatgaggaaacagtctcagaaagtttatgtcatgtgtgcccagccacgcagctggtcagattgcagggctaggtttctggcatggtaggatgacttgagggctcttattgttaaatcactgaatgattaatacttttggaagatagttgagagaaagaacattttcaaagtgttgctgtaggttgaaaggtacagtttgaaaacactgggttggtgagtgtgacatcctagggtcaaccacctgggctgttccatgaacccaatagaacaggagctatgtggcctgccagcctttctggatcactttcctttggggcatttgggagaaggtagcttgtctcctgtccacttctttttcagtctgagccgtacccactcctcccatcttcctgcagctaacatggctctcagcaccaggggccgtggtcctctaggctgccccagccctggttcctgcacacccacattcttcagcttaaaccgccactgacataggggaaggcccggagtcactggggcaggggctctgctaccctctgcaggcgtggaggcagggccctaaaagagggaggagaggtggaagagaagggttcactgtgggtgtggaggcatggagaccactctcattggtggctctcttctgggtcctcaggcatcctaccacagggttgcctctctctgacccacttgtttctctggggtctctgccagctaccgtgatgcagagctgcaccctcagtgcacccttctcttccacctcccctccctctttagggccctgccttcaaggccacctcctgaaaactccaaatgccatccctgcatagtgtagactattagacctcccagcctcctcttcatatgatactttaacccatctgaaaaatagaattaattagcttttaaaagctttttaaaatggccactcaaggctgggcgtggtggcttatgcctgtaatcccagcactttgggaggccaaggtgggtggaccccttgagcccaggagtttgagaccagtctgggcagcagagtgggaggccacgctgtgcagggccacacagggaagtgctggggtcagtgccagaatcagtgcaggggtcaatcaggaggcagagagagcgaggggaacacggggacaagcgcctttattgtggtttccaagggaaggaatgggcgaggcagggtaaacaggcctggggactggccagtttgaataatttctgtgggctctgggcacacttacacgtagacatatagctgtctatgtaccgacatagacggtaggggctgtcctgagttgctggaacctggccctatggtgcttaggacaggggaatgtgggccctgagtgtgacaggctgtggaggaggtgtggggtatgggctcagagtggctggtttgcatatgaaaggcctgctggtaagtgaggagtcctttaccatctccaggaattctgggaagagagtgcctccaaggtcaacaaggctccagatgtcgaagcatcagaaatacaaaaaacatagtttggcataagattaaaaaaatatgggccaggtcaaatgtatagactgggctccccttcccacggattaagcaaaccaatgacctttctgtttctttcatgatgcactcatgggcctctaagatggcacaggaggctcactgtagagttcaaagcaaagcctcaggctctgtcagccttgttatttgtgtgaaatcaggcaagtcaaacaccttcccaagtcccagtttccttgtctgtgaggtggactgaactaataacagtacctaccccacaggactagtgtcctaatatgtacctagttgatgtaactgccctacagattcatcgtgctggctgccaagatagagctgatttatcaagacaggggaattgcaacagaaaaagagtttaatactgagctggctaaatgggagactggagtgttattcttactcaaatcagcctcctcgaaaattcagaggctagagtttttaaagactgtttggtggtgatacggtttggctgtgtccccacccaaatctcatcttgagctgtagttctcataatccccatgtgctgtgggagggacccagtggtaggtaattgaatcatggggacagttatcttcacccggttctcgtgatctgaggttttataaagtggttcccacacttcactctgtacttcttgctgctgccatgtaaagaaggacatgtttgcttccccttcccccatgattgtaagtttcctgaggcctccccaaccctgctgaactgtgagtcaattaaacctctttcctttctgaattacccagtctcaggtatatcttcattagcagtgtgagaacagactaatacaggtgtgttcccagaccaaaccgagggtctggctgcttattctcatggcccaataatgagatgaagatgaactgggaaagaagagagtttatttctgtaatcaggtacaggcagaaggcctggaaaatatcagcagatcaactcgaaattacaaagttttccagagcttatataccttctaagctatatctctacatgtgagcgtgcattcttctaaagacctaagtgtctaacttctttgaatctataactaaaactaaggtctgagttttgaagaccttcttctggagcctcagtaaatttacttaatctaggtgggtctaggggccaggggtgattatccttcgcttgtctcctgctaaatcatggaggtttggggagatcctttagacccccaataaaacttgattgttgaggcctggggagtttcttcagacccccagtaaaaacttgtttagtcctaaatgggtcctgttaagaattcctttgttatcttgtcatgcttcaagtccccggaaaggcctgggcaaaactcttggtgggcttttgttacattccagcctttgtgtgatggcactggctctatcagctttgaatgtttaacttcaccactcagtcagtgctgaaacagctgttatgaagacctgcctgttcagctgttagcgagatctggcctgccacaggtgggcagggggctagggaataggagtgctgatttgttgggtcagggatggaatcacaggaagttgaggctgtcctctagccatgagtcaattcctgggtggggaccacatgaccagatgagccagtttaccagtctaggtagtgccagcaggaatgcagtgtctgaaaaatacctcaaacaccaatcttaggttctacaatagtgacgttatccataggagcaactggggaggctcggaatcccgtggcctctggctgcatgactcctgagtcataattcctaagcttgtggctaatctgagttttacaaagttactctggtctccaggcaaggacgaggtttgtttctggaaagggctgttttcatctttgtttcaaagttaaactataaactaaaattttctatggttagctggcctatgcccaggaatgaataagggcattttggagattaaaggcaagatggagtcggttgggtcagatctctttcactgtcatcattctctcatttttataatttttgcaaagccggtttcattaataggagggttgctattattagcatgcaagttccatgaggtcagagactgtattttgttggacatactaaataagtatttgttgaatgaataaattctaagatttttaaggagtttttacgttttgtttttaaatttaattttttacgttggtaaaaactttaagaagttgtaaaaacagaaactatatttaaaaacgcagtgaaaattctccctggcctctttgtccctgatctgcccagttcttgctgttccctaacaggtaacccctcttcttagtttcttatggatcattccagagatcttatattattgcttaatcgcccatatagattctaactttcctcttttttatgcagcaagtagcttattatacatgctcttttgcaccttgttttatcacttaacagtgtatcttgaagattttccatgtaagtgaataattccccattattgttatagctgtctagtgttccattgtatgaatgtactgtactttatttacctgtcgtctatgatggacacgtgaattgcctcctgtgttttgttttgttcttacaatgatgtaataagacccaatgttttaaaataaaattgttttgatttctttgtgctttattaaaataaattgacttggccaccatgattcccaccctcccacatgctgcctaaggctaaggtttgggggccacccatgcctccttcccttctgccatacggcagtagtagcacccctggatggtgagtttgggaactagttctttttctacggaggaaaagcatgtgccctgtcagacctcaagctgccttggcctctccttcccttgcccatgccagttcctgccttctctttctttgggttggcagcggctctttcggtccccacacttctccaccccccacattccaatggctccagagcacagctagccaagaggtctgaggaggctgggagcacctgtggtgttttcctccatgtgggctgcagggggtgtggccaggacccacgggtgtcatttccacccatgtaggctctgctctgcacacactcatagctggccctgtgcaggacccctggccccctccttgcctcatctgagcctctggaatcctgtctgccacttgccaggcccctggttggtgccgactgagagtgcagcatccctgatgagcagagggcacctggccctggagcctgtgcttcagtctgactccagatggggcgggtctcctcaagggccccagacctagaggcccctggataaagccacatctcctccatccctgtgaaatgaatggatgaatgatgagtggccttctgggttttctgtgaccaacctcagacccctctagcctcccaggggtccctcttctgcgccccccacctctcctccctgagcaatgcttcctgggaggctctgaatttctgactcttgtgaacttgactaccacagcctgctccttacactgcgggagaggcagcctgccctgctatttccagcccttccttctacaggagtgggggctggtgaagccacccttcttggagggacttgcccccaggccgatagcagggtttgggggtgcatttcatggccccaaaaagcatttcagggaggaaataacaagcagtcaaccctggctgctgtctcttgggcatccaagaggcaccccaggctggcaggggtgggggtgctacttccttctgcatttcctgccattgttccctgacccacttccgggaattctccctgggctgggagggctggacaaccagcaagggaggcagaggaggtctggcttttctcggcaccctatgacctggctgctaactctgctctgctcagtcctgagggctcctaagctggagctccagctgccatgtacagctctctggtccatgaggcctccttgggccctgcctcccagtccccaaggagagaagcctcagtgctctgggggattgacagggaacctagatacccgggtcctggggctgactcagccattctcctgcttgaacaagtcactcccctctgccaccccagttttctcgtgatgggcagggttactctgatctctgatgtcgcatggactcatgcatcctctatacctactgtctggtctttttgacattgtctgggtcctgaggacaattcagtcaacatactgacgggtgccttctggcaccagcccctaggatggagacactccaggagccccagcttattaagtgatggtaaaaatcctgctccatgctgtgaaggaatggaacacaaatcagtttacattctagaaaatatggctcctaacactgtgagggggtttcaaaccctggattgaatattagtgaatatctctccccctctatccccttctttcagaaagggttagaaaatggaccttgagcgtatattacatttactgccttgctagcaagggcacgagcaaggcggcagagtctgttgctttcaagaaggatggaaaaagagggatttcattgttgagaagcttaaataagtggctagtttttaattttaagttttattatgataaatcgacataaacgctaccattttaaccatttgtgagcatacatttcagtggcgttacatgcattcatgatgtcatgcagtcattcccaccgtccacctccaaaatgttctcatcttctaaaactgaaactctgtaactgttcaataataaatcctcacttcctcctccccccagcttgtatcagccaccattctactttctatgaatttgactactctagctacctcatacaatatttgtctttttgtgactggctgatttcactttgcggaatgtctccaaggtccatccatgttgtagcatgtgtctgaatcttcttttttgagactgaataatattccattgtatggatggaccacatcttgtttgtgcctctgttgatggagacttggtttgcttacacctcttggctattgtgaataatactgctgtgaacacaggtgtgcaaatatctaggtccctgatttcaatttttttgggggtatataactagaagtggaattgctagatcatatgctaattctaggtttaattttttgagtaactgctatgctgtttcccacagtggctgcaccgtttacgtccctacacaccatgcacaagcattccagtttctccatatcctggccaacacttgtgatttttctctccatgactctgtgtgtgtgtgtgtgtgtgtgtgtgtgtgtgtgtgtgtgtgtttataatagccatcctaatggatgtgaagtagtatctcagtgtgagtagtcagttttaaaaatcacctcgttaggtcgaggttgcagttttatttgatagggtcataaaaatctatattccaatcaatatttgcagagaccagaaaagggatgagcccagatgacaggtgtgctgttcatccatcaggaaaaagcagttaataagtacacctgtggctgttcaccagcctaacatggccttgtgccctgacagtaatgttcagggtaagtccatttctcagggaggcaagcagaagtcacacacagacaccaggcgacaggttcctacagtcacaggccactcactgcccatggtttcctgctgcctctacagaggggcagactatatggtgagcccacttcatagcttcctctgctctctttgaagggagcatgtgccaaccatcgcgctgctgacctactctttcctaatagcccatacatgtgccccacccctcctgtcagtcagaaatgcagcctctggtgcgtgtggtatggaccgcccagggcctctcaggagtggagcctgtttcccctgccccaatatccttttctccctgtccctgaagacaggaaggtttccttgcttttcatgtacaatcaatcactgccggcggagccctgggattccaatacagacggcctgtgtagacatgggtcatatgatctgctggggctcaggggcagtgtgggggtgatgagatactgacctggtggactgtcaagggctcatgggaagacaacccttcatctctggggaggcgtggctgggcctctggggaggggcaggaaggggtcaaggtggaccttggagaaggaaaggtatctcttatcccttcccatgcccaagtatttccctaggggccaggccttccagggatggtgcatggtggtgactgggtgtgggggtgcaggagagccctcgtggggtgctgggtgactgtgtggtctaggcagaccagcctcatctgagtggtggcagtgaggggtctggcagaagagccagggtgccttaggctagttttctacatttgacttctctctcctctcaggttcctgggggaagccaaggtcccactccgagaggtcctcgccacccctagtctgtccgccagcttcaatgcccccctgctggacaccaagaagcagcccacaggggtaagtgcccatcagcctctgccaggttaaggtccaaggcattgccaggtggcttcctctttgggccttgccattctgaccccagacatgcatctgacttcagctcccttgaagcaggcctggccctccctgaccagagtttgcagtgtctggaggggcactggactaggggagatgggaagggcagagggagccctgaccccacctgcagggctcaagtcagccttggctcgcagcagcttggcctgccccttggtctggtgctgccggtctggccacctcctgtccccagcttcctggtcagccttggctatagcccacctagtctccctggcagacctcccctcctccctcaccatccagccctcttctccagattcagaatctctgaaccatctgggtcacagggcatgagggatggagggaaagagccctctcccctgcccaccaggaccctcttccttttcctccgttgttcttcctgcccctccctggccttctcagtgctccccccaagtccaatcagacaattcccagccctcctctctgcctgttatttttagtgagctaaatataccctgtagggttctctcttcttggtagaattcctgacctctcctgtgggttagccccgccttccaggatgtaccaggaaccatggattggaactacttccgccctgtgaggcctgggggattcaggccctgacttgtctcagacagggcagtggtactgccccgtggcgggtgtgtgaggccggggctcctggctggctgggtgagtcaggaagtagccggtctgggcagatctctgaatggaacgagactggatgctgagacctagagaaaaggaaccactgaagtcacatagtcagtggctgttcccatgggggcctggaccaggagctcatcccctagaccctctggtggaatggctgtggatggactcctggttcactgaactctcagtctgctgccctctcggtgctggactttgctcccaaggggtcttaggctggggatggctgggctgctcccttgatggaagatgtcacttcccaggaaagtccatctgtttcccacacagggctcactggcagaatgttctggtttagagcagtattcactgagcctgtctccatcaccctgagtcccctctcatcctccgtttcagcctcctgtctcttaacactccctgtggtcaaggaggaccccaaggagttctggaactaccccttcaggggtcctgaggaggctcagacccaaccctcaaggcatgggacacagatggagggatgataggtatcaaggcagctggcgagagaaagccttggggtcaggcttggttctcacttccttgctgggacaccagcatctctccactccagctctgtgtgcatccatgactctggtgtttcctgcccttcggtcccttccaacctcaaaggcctgtccagccccgaggcagagttttccatagctggtccctattcatgagccgtgtcaggctggagccatcccctccatacctcccttcgcctcctcctgctccttgttcccacactgtctgggcttcatgtttaccagcggggagcctgctgccttctcttccctggctggggattcctggctgtctgcagagctttacaatccttcaccaaccgtgtctccaaaaagagtgtgtgagatccaggaggtggcggatgggagagagtgctggaccctgctgggttgagccccactagctgagcacaggctggaaatggagttggggagcctcctccctgttgcccaggaggcagtcctcacctgtacagagggtctaggactagattctagtccatgtgatggcattaaggtcacagtgcagccccagacaggtcatatgtccctttgggctggggcttcctgcctgggacctgggctggctgcactgtagtgcgaggcagggataactgggggtgtgctgggcagggacagacagccaacaacattgagggttctcgctggccgctcactgagacctcatttctgagctaagcccaatcagcagagcatgccaggtgcccccatttcattgtagctctcagttgcctctaagggccaaagaacctgctgatggggtgatacgagtgaacacagagccagtgggatccttaggaaactctggcagactgagaggcgtgggggaggccgggagtcctgccgcaggctgactgcagaccccgtttgccttttgctcagtgttctcacccaagtcccttcagatatagcacgctgggctgtgtgccatggaggatctggctatgtgccaaatctaccctctgacagctgctaggttgatggggaaaacactcccccagtcctggaggaacctccaggccatggggatttaggacacacatggaggaaaagaagcagcatcctctcagatgtattttaagaggagctcactcaggaaggtgtggatacatggagaaaactcagtcggcatcacccgggccttaaagccagaatcggatcacaaaggaggacaagagcctacgaagcccagtggtgtgtgggtcagggaagccaggagggcactgtgtgttgggagcggggacctgaggcgggcaggacagtgctcagtgagtccctgagctttcttcaaaggtttggagcttctgccaaccaaccctgtatcagctcagggccacagctaccctctgcctgcttctggaggttgtctgagggagaggttagtgagggccacgcacatatcaggcctgtcttgtccacacgggacacatgtgttaggggaggtgagagtgggctggtctgggttttggttttgatgagctcagtgttggagagctgtggtcgaggaagtaggtggcgcacaatgggctgggcatggcagggtgggcgaaggaccccagagcctgaccacataacctggaggagggtcacagccagggagggtctgaggaggtcattcgccttcagtttcctgagccctcttagcctggggcaagacaggagtctcaagttctgctgatctcgttgattgtgggccccaaggcagcagacgagggcgaccgaggttaccctgctccagggcagcgtgtttggtggacacacgattgactgacaatggccttgtgcgtggagaaccctggagtgctgctgagttggagactgaggacctgggctgtcaggcgcgggacccgtgacgtggaggaccttgaggaaggtcccactgggagctctaggcccaggttgtgtagtccgggagagcacagggctcacatatatcccccaggaagaaaatcttagctctatttgtctagagaaggagacaggggttgagctgtgatgtcatggtgagggtacaaggtcctggtcctgggtggggcccactgacacgcccactttcccttaagagcctcagcagagccaaagaacttcagtattcaccatcagatcctgaagccatggtccctggggcccacctcctagtgctgaggtctgttctagaccctgagctccagagcctctggagctgcagggatgtccctgtggctctctgatgggcagctagaagacagacctgtgctggaagtctcattcaagggcccagagcaacccggatggtgccagttcttcaggaggttggtgtggagctgtcggtgtagaaacaccggatgctcaggaaaccccagaaggggctgcctaagtggtctctggagccctctctctggagagggctgctcctgtctgcatcccggagagggctgctcccaagccccagtgctgaggagctggcactgggcacggtgtggaagagttacactccggcggctccacctctcacagagatggtgtatagaagcccccaggtggtgtgcagtgagtggatagcagggtgagcccctagaaacaggaaggggcgctcttccaggggacctgtttccaaggtcagaggcccaagggcagcccaggtgtggccccttcaagtttttgcttcactctcctcagctcaatggggtccactcagaccgcttgatttaacactgcaatctgcaaaatgtctcattcccctgatccttcttgctctggtttactttttcttttctttctaacatactctcttctttatgtatttattttgtttattatttattgtctgtcttctctgccaagacatcagctccatgggggcagggacctttgccttatttatggaagcgtccccagaatcttgaacagtgtgtttggccctggcaggtgcccaacacacaggcacgtgtgcgcgcacacacacacacgtagagggaatgaatatgtgagttaatgaatgaatgggtcaggccagacatgtcaggcagggccctcagtgttcatctttcagatgtgggcccaactcaggccaagtcaaacaaacaccccccacaggcctggcctctggggccactgcacggagccctgcgctcacaagggcctcatgcttggcttaattctcttctgtttccatcttgaaattcttaaagctcactgcatccttgacctccggggctcaagtaggctcaagtgatcctctcgcctcagcctcctgaatagctgggactacaagcatggctaccacgcccaactagtttttgattttggaataaggggctctgcattttcatttgtgctgggcttgcacattatgcagctggtcctgacctcatgctaatcttggagggccggagtcagcatggatgggcagggggctttatttgtctctgcctaaggagattcctgtggctattcctaaaaagaagcagattttcaaaaccttttatttggaaatatttaagatctagacaaaagttgccaagtatggtacaaagagtattttgtcctaagccatttgacatgagggtgccaacctcctggcccatcattctgaactcgagtgtgtgttctccagttaaggactttctcctacataaccacaacacagccttccaaacgatgaaattaacatggacacagcactctcgtctaatccccagaccccagtcgcggctcatccatttttcccagtgtcctttgtagcagaaggatcccactaaggctcatgtgttgcacctagttgttttgtttcttcagtttccttccatttggaataattcctcagtctttctttgacttttataaccttgtagctggatatttttttgaaattccggccaattatttgtagaatgtcccccacattggttttgtctgatgtttcctgtgtttagatttaggctgtgtgtcttgggtgtgagtgtaacactgatgctgcgtggctgtctttgtgccctatcaggtgggatgattgtgattcgtttggttaccacactgttaactgtgatcatttgattacactagcatttgctgggtgtccccgctaatcgttcatctactcccctttctcatgtcagaattttgtgactttgtaatatcctctttgtcatctaacctttacccgtgagttctatgagctgttgttttgtatttgtatttttactttttttgagacggtatgtcactctgctgcccaggctggagtgcagtggcacgatcctggctcactgcagcctccgcctcccgggttcaaccaatcctcccacctcagcctcccaagtagctgggattacaggggcatgccaccacacctggctattttttttgtatttttatagagatggggggttttaccatgttggccaggctggtcttgaacccctgacctcaggtgattcacccacctcggcctcccaaagtgctgggattacaggcgtgagccactgtgcccagccgtcatgaagtgtttttgtttttgttttgagactggtctcattctgttgcccagctggaatgcagtggtgtaatcatggctcactgcagccttgacctcccaggctcaagtgattctcccacctcagcctcctgagtagctggaactataagcgtgggccaccatgcctggctaattttttgttttttgtaaagatgagggtctcactatgttgtccaggctggttttgaactctgggctcaagaaatcctcctgtctcagcctcccaaagtgctgggattatagttgtgagccactgtacctggccgtacccaggagttttaatatcactgctgtttcttggttgaattcattattgctttgatgattgctaaatagtgatattctcagttatttttcctgcattagtcagttggcatttcgtggtcaggaaaagctttctcctctcctatttatttactgtggtatggatttgggtatttctattttattcaattgtttaatctgttactgttattatgtattttcatgtttctattgtctcagatttggcctgtgggagctcttgaaagttggcttctgtgtccttttgacatgtttttactttttattatttatttattattttattttatgtttttgaggcagagtcttgctctgtaacccaggctggagtgcagtggtgtgatcgactcattgcgacctctgccgccaaggttcaagcgattctcctgcctcagcctcctgagtagcagggattacaggtgcatgccaccacgcctggctaatatgtttgtatttttagtagagatggggtttcaccatgttggccaggctggtctcaaactcctgacctcaagagatccgcctggctcggcctcccaaagggattacaggcatgaaccacctcgcccaggctcttttgatgtgtttttaagaatcagtcattcattgagcatttccttcctttctggtgcaagaagatggtccaggctcatcttgtatcttccctgccctagccctggaagtagttatttctccaaagagcccaacttaccttttgctgaagtggaagaaagtcccaggacagttgttaaaagtgcaaatacccaggcccaccctagacctactgaactggcatctctaggagtcaggtgtggcatctgggcggaggggaggactttcttcttttcccctccacgggttgcaggagctgaagggactggctgctcacgtggcgacacctggtggtgattcaggaacccacagggcaggttatgttcattccttgggtgagggaattcaagggtctcagttgcctttgttgacctcctcctgggtctcctgggatgctgagctagctcttgtctccttcctcagtgttctgagccctgctttccaccagtgctgctctccttagtgtggctgtccccaggccccagtctggagagttcaagctcaagagctgagtatgtcgggagccttcaggcccttctctcttgggactgagtttgctctgtgagtccctggacgtccctaacatcattcagcagaaaggtccagtgaactgtgccagagccactcagagggacattatgcctcaggaaaaattgtgtttataaagggtttgtcaaaacctggggagagcttattgcctgacattcagtaaaagaaaatcattttgcatacagcagatctgtctactatttgtttgaaagattggagagaactggaatgtggagtcacggaattatggacaattggttttcttttgccttatttttcctctttaagctttctgtgcttcccaaactttcttagagtatccgttgcactaatttgagagactggctgccccaggaggcttgctggacctgtggagccgggacagggctcaggcaggcccgggagcagccaggctgcagatcctgctgaggttgtgccgttcccaggttcagggtgagggttggggtggggtgggcgcatgggcaacccgacctcgcctgtgagggatgtcaccagtccctctcctctctggccggtgcaagccggggcagctgaggatgtgctggggggcaggaaggaagagggctctgcaagcctggcagcacactgagaccctctcagtgctagctgcagcctgagcaaagcagagcaaagctgagttgtccctggagaagtaggggcaagccattgactgagcagagtggccaaagggacattttcctgaagacaggccaagtggatagtgggaaaaatcctgcaggtgaggttggatccctgattcatttgcagaagtccactacgtgctacatcaactaatttgctccacatttgacctgtgaggaaggtgctattgctatgactaaccccaattttatagatgaggaaactgaggcacagggcggtcacagatcttgcctaaggtcacacagctcctgagtggtggaacctgaccccggattctgtgcttcgaaccacctgactatgctgataggtcccttggggtggctttgccacagcctcctgcaaacctggctcttgtcagagccatattccttggtggagggatgccagaaacagggaagatactggagggcagtggtccgaggccagcgcaccaacctgtcccccacgtctcatctcttccaggcctcgctggtcctgcaggtgtcctacacaccgctgcctggagctgtgcccctgttcccgccccctactcctctggagccctccccgactctgcctgacctggatgtagtggcaggtgggtagcccacgttggcctggctgggccccagcaagaaggccggcagtggcacttgagcctgggggctgggagctgcagcgaggcttcccagcctttgctgccctccccaggttggaggctgcccaggcctggaaagaagagggtgcagtgggtgggaagtcctgagggctgccttctgctgtgcagaaagaaggggcagcaggcacgttcccttgggcggtgcagggagtaatgtgagggtgcctccaagccccagctgcctggggacggggctgagcccaggctgggtgttctgagctgtgcagttccaagaagggtgtgtggggatggggtctgacccaggtgatacctgaggccccacaaactccccagaaccgaatgtttccctacctcagcacccagcaggcctttggtgatggtgtgtgacaaaagaactagttttttttcttgaaagagccctgaactgaacttcagggttccagtcctgcctttgacactgagtctctgtgtgactttgggctgattactttccctctctgggcccatagattatttgtgaagggagcagactaagttagctaagtgctgtgcctgtctcagctctcttcacttggttctgccaggctggtcaagcgaggacccagcccggggtggctggctctccactggtgggcctgggtgtgggagcctccatgtggtccagcctgctggggttgggaggaagctacatagacgggctagtgggcacttgcccatgggaaagattctagagtttttctcttagtgaagggagctagaagcaagcacagcattaaaaccggagcagcccatgtctcaattgagtgtgccctgtgcctgacctggggccagcccagcacagggctctgtggtgaggtcggcagagcagagctgtcttgttggggctcagcactgtccgagcttagagatgggagatcagtctggactggagtaacctggtaatcctgagctgtgtggctggagtgggctcaggggaggaaggagaggtgcccgtggtggcagagggtggggagcagggagggtccgaatactctgggactgtgttgaggtggatctgacagagttaggtgcaggccaatcagtggaggcttccagacacgcctgggaggtggtgagaaggaacaggtgccactgggctccacagctatttctgagctttgcaccaggctggggtgggcggggaaggcagggttggggatggaggtgcagtaggttggtttccttcaccccaacctcctccctcccctcccggggttatgccctgcccacaagacaggcgggggacagagccgggccgagacttggtccctgctcagtgacagcaccatggacacgagatactctggaaagaagtggccggcccccacgggtgagacacgggccaggactgtcctgatcccagaccctccctgtaactgtctcactagctgccatggtcagcttgctggagcggggccaggtggcagaggactcctcctgcaggacttggcgggtgggagggctagggccattctgttttcttcctgttgactaactggactgactgccctcaagtttcagctgctggaagctcctcttctttctaccttatccatcctggctcactgatggggagggaggagggagaggaagaggggatgagtcttagggcccatgccttttggatcttctgccccctgggctgggtcccaggggcaggggcaggggcagggccagagggatccaggcctcattagggccctctcctcttagacacaggaggagaggaagacacagaggaccagggactcactggagatgaggcggagccattcctggatcaaagcggaggcccgggggctcccaccaccccaaggaaactaccttcacgtcctccgccccactaccccgggatcaaaagaaagcgaagtgcgcctacatctagaaagctgctgtcagacaaaccgcaggatttccaggtgatgaacgggctttctctgaccccaggctcctcttcagccatcagctgcgggtgccaggcacctgcctggtttgtccagcttcaggggaagatgtgtgtgggatcctcagggccctcctgtgggggaatctgtagtttccctgggcctgggcagatgccaaacagggagttcacatcttacatccacagaataagcttctgccgagacctgtggttttgcgcttaaaaaaaaaaaaaaaaaaaaagtcactgcagagattcagcatgtctttgcatctctgatcagagaaaaacctgatttttctaaccagggtatatccaaccagcaagctcctggctattcaggtgtggtctgtgtccagcaccttccgcatcacctgtatacttgttagacatgcagagtctactcagacctgctctaccagaatctgcattttaacaagatccttacctcaaagaagctctgtctaacatcttttttttctccttatatctatccccctgcatatagccatggatttttctgagagtcatgtggaatttgaatttgttcaagctcatcacagaataaaagctattaatatgaacactttgacacatttttatccaaaaatccatcccattttatttgcttttaactttggtcctttgcctattttttttttcttttcaaaagaattttctattttgatgtagtcacacagtgatatttaactctttacaactacttttaaggttaaaagcaagaatcttaaatctctatttataatactaagtgcaacaaattgcaaaaatatatttctattctaaatcatggtaatttaagcagaagtcctagctctaaccactgtttgccccaaaagacaaaattctagcccccatactactattccccaaacatgttcatattgcctttgttctctttatggaaataccatatgtttattttagacactttggaaaatatattaaaatgaggagattaaaaatcactcatccatcttcccattgctattaagaatatatcctcccatattatgcaatttacaaaaaaaaaaacagttggtcagtaaataacagttgattctaaagtggagccagtaaatatcttatttttttccatagaattgccttaatattgtaaaatttcatattttaaaatatcttacctaatatttggaagcatagacgttcttgaagtcttcatttacttacagctcaatggcaaaaattcttaatttatttctcagaatgtaagaaagcattgcatcttataaagaataaagactatttctggggtcacttcactgtgtaagttcgacctctgagggaattgtcaataaagaatattcaagccacttaaaaatgccagtatcaatggggtctcgggtggggcttgtgccaatggctgaatgacataaatgggggctgtatctgcccacccctggggtttaatgtgggtagccgacgaggggcagcctggcagctcttctatggagctgtggaattttatagatgtaaggggccttggtgggaaaatatgatagttcgtataatgctcttcctaattcctttttaatactttccccaagaagccagtggtgagatggtccctgagatttctgactcttggggtggatggtgggtggtccttaactcttcccccttcctcctgctctttcctccttctggctttcagatcagggtccaggtgatcgaggggcgccagctgccgggggtgaacatcaagcctgtggtcaaggttaccgctgcagggcagaccaagcggacgcggatccacaagggaaacagcccactcttcaatgaggtgggagacatggggcatgagggccagaaccttggtgggccttccaatctggaagcccagtgcagacacctggcaattcattcaagagtgtttacgtatggcgctgaccttgggtggtgagatgtgctggctcccaaggaggttatctgtgggactggagaaagggctcctgctcttacttctcctgctgctccacatccctgtcaccctatagggccagccacccacccaaccctgaaatgaccacgtctgtgaggccaggggcagatcaccccagaacttgtccaatccccagaactgtgcccaatccacattttctgaggggactaaactgctaggcgtggaggcttgggggtggtggtcctccctctccctggcctgagggatcagcaggcactgatatgtctctctttgctctgaaccaacagactcttttcttcaacttgtttgactctcctggggagctgtttgatgagcccatctttatcacggtatgtctcagcagtcaaagtgttctccgtgggctgtatgtatgcacataggtgtcagtgcacacgcgtgtgtgtttgtgcacgtgtgtgcatgtgcacgtcagtgtgaatgcgtgaatgcgtgtgtgtgcctgtcggtgtgtatgtgagtatgtgcgtgagagggagacgtgttaaagcctgacatatggatgatgtggagtaactcacagtcaggctctacgggtcacagaaatgcctgcaacagctcagctggcaggcagcagctgcgggagagcccactgctcagcatccccctggggcctcaggtcagggtccttaaatcacttgtggcaatgaacatttaaggttccatcttattttgttaatccacgtgcctgcttctgactgagattctctttctctctgggccttggctcttcccccatctcctctgaagcgcactgcagcctagtggctctaagtgtaggctccggcactagagtggattccagctctgtctatgccgtgtagggattgtgttttctgtacaagtctctgtgcccctatttcacctgtgaaatggggataatgacagtatctgctgatggggttcctgtgagggctaaacactgcttagaacagtctctggaattgagtaagtgtgaagtgttggcagttattgtttgggagggaagagctattgggttggccgtgtgggccacatgttccctgtgaatgtgagtttccatgatctttctctgcaggtggtagactctcgttctctcaggacagatgctctcctcggggagttccgggtaattgcttattttctatgaaagcagtcagttctcacttctccgtgttggtggagcctctgtggaccatgggcaggggctccagagatcctgtgtttctctgctttgggaaaatataatttcaaagaacaacgccaagccctctgcacagcatctcctttcaccccagaaaacctctccacaaaggtagaagagaaagaaagcactttttgtcactgaagaggccttaaaccagagtgagatgtacatcacaggcaatgatccactaagatgctgcaaagacagaaagaaatctcacgctaatttagccagcgggtccaacccattgcccaccacatacgttctcaagagaagctatgccccaccctcaggtcaggggactttacatttcagacctcctgagaatgacatttgtatactaaagctgacaaatggcttatttagtttcttaaaaagatgtatagcacctttggtcacaccgagttcatcccaaagtcacctggtaatcggggtgaccatctatgttagctaatttgttgtgtccagaagaccaaacaaaaatcaaactcatatttttatgacaggaagtagttttacaacttggagcaaggtgcgcacgggagttaggctcctatcttccgacagaagctgggacacaggggagccgtctcccttggtgtttatatttcagacgtcctgagaatgatatttgtatactaaagctgacaaaaggcttatttagtttcttaaaaagatgcatttcaaagagacagggaaagtgtaatatatttacaagttttctaaggtaagtgttctgacaaaaagagaggggagggaagtacttcttcccttatttccaacaagcagaatcaagacccttatttgtaatttggattttcccccacctctgggaaggccgtgtgagatctgagtttgggcagccctcctcctcatcctggccatcttgggccagtgagacccagcgctctctgccctgacatcactctcaccctgggatgggagtggggttcagatatggatccctgggggagggagaggcagtggagagaggggaaccctgccccagcctcctcacttgtcccagacagtccagaagtgaatagtcctcttctgagaaccgagagccaatggatttaacagattacgtaaagtaaaggtaactagtaattgcacagactaaaggagacctgtatgatttttttttttttttttttgagatggagtcttgctctgtcgcccaggctggagtgcagtggtgtgatctcagctcactgcaacctctgcttcccagattcaagtgattctcctgcctcagcctccccagtagctgggattagaggcgtgtgctaccacgcctggcagtttttttttttttttggtatttttagtacagatggggtttcaccatcttggtcagtctggtcttgaactcctgaccttgtgatctggctaccttggcctcccaaagtgttgggattacaggcatgagccaccgtgcctggcctgcatggtgttttaatgtaatttgatgtaattgttactaattttctcattttgaaattttcaaggatttctcaaaaggaaagaaagagcacaagcttattttcccctctcccctctatccaagtatatcatgccttccttctttaaatttgtattttaaatatgaatttaaaataaggggcttggttctgcctgttgtcagaagttaccttagaattatttattctgcccaataaataattgctgggaccaggcgcagtggctcatgcctgtgatcccagtgctttgggaggccaaggtgggcagatcacttgaagtcagtagttcaagaccagtctggccaacatggtaaaaccccgcctctactaaaaatacaaaaattagctgggcatggtggtatgcgcctgtaatcccagctactcaggaggccgaggcaggagaatcgcttgaacctgggtggcagaggttgcagtgagccaagatcgcaccattgcactccagcctggatgacagagcgacactccatctcaaaaaaaaaaaaaaaaaaaaaaaaaaaaaattactgggttggacctgatggctagatcagtgggtgagatttctttgtctttgcgctgtcttctcaaatcattgcctgtgggaagaagtcacaagataaaaaactaagtctgtttacctggagaagcattttttaaaagaatgagcttgagcccaagtcattctgtaacaaattaaatcttaattatgttttgagtcttgttctgagaacccaagggttaagtcaaaaaattattttacttgtatctaattataaaagtaatctatgatttaaaaaaaagacgactttttaaaacagactgttgtaggttcacagcaaaaattaagtggaatgtacacagttcccatatactccctgccccctgcccctgctgccccctgcagccttccccactatcatcatcccaatcatctgtggatttttaatagaaaattgtaaaacacaggaaggaataaaaaatgaaataaaaataatccaaatctaccatgcagggataacatagtcctattgtgttgaatttcctttcctcttttttttttgagacggatttttgctcttgttgccaaggctggattgcaatggcatgatctcggctcactgcaacctccaactcctgggttcaagtgattctcttgcctcagcttcccaagtagctggaattacaggcatgcaccaccacacccggctagtttttttttttttttttttttttgtatttttaatagagatggagtttcaccatgttggtcaggctggtctcgaactcctgacttcaagtgatccacctgccttggcctcccaaagtgctgggattacaggcatgagccaccacgcccagcctcctttcctctttcttttctgtacataagcattctttatcaaactgggatcaaaatatatttcattttcttttcatgtagtatcaaatgttgactgcctgtgtttccaaatgttcttcaaaaacatggtttttaatggaatcatataatgcaccacactttatttaacgctttggcggcaagagtttgatttgtgtctcctctcattgattgcagatggacgtgggcaccatttacagagagccccgtgagttctcaccactttggccgtatccttgcattttggttctggaggctgattggggacactcatttggggtcctcactgtccctcctgggggttttagaatctagaggaagggtttgatcttgggagagaaagcaggtcattcatcctccatgtgagacaggccctcgggagggtgtaacactcacctgtgtctccgttggcccattcagggaggctagatctgaaaggccccattactggacactgggctcacggcagacagggacaggtcatttgggtgacaagccaggatttctcctcaccctggtttccattctgatctggtcacttcctgaaggggaggaaaatgccttgggtttggctctgccagcctcttacaggcgtttctgttaatatttctgactctgaccacatgaacactcaaagtaccttttgattctagaatctgagtcctgagctcatggcccagcggatgagtcctttacctcccctgtgcagtccatcctgggttcccggatgtggccacagcctggggtcttctgattctgggatcaccagaggatgttgtctctcttagggcacgcctatctcaggaagtggctgctgctctcagaccctgatgacttctctgctggggccagaggctacctgaaaacaagcctttgtgtgctggggcctggggacgaagcgcctgtgagtacatttccctgggtcttccttacggtcccccacgcggcacttggttgcggaggcaccaaaccacaaacaaaaactctatttttttttctgatttaaactaatatgtggtaattaatgagaaatgtggaacatgtagaaaggtgttaataaaaaatgaatgctctgggtgcaaggtattaataaaaaatgaatcactcataatcctaccactccgagagagctattattgtctcattgcacatccctctggaaggatatatgcacatattttctttttgcaacagtgagattattctatatatattatattgtgacttgaatttcatggcctaagaatgtatcatgctcatctccacatgtcagtaagtaaagttataagttggaggtggtaagaatgagaaaaatgttgagagcaggagaggtatctgcatctttctatgtttgagaagaggagaaaaggtttggaatcatctttgtgggagaggagtgaggggttagatttaatgaaaggatttctgtacaaacaccagagcacccactctgggttggacgctttgtttgtagtggagccacttgcctcatggtgctcagcagcgcagaagcagaagagaggcaggtgggtggtggacgtgttgggtgagggcaagccaggagtgctgaaggtcaggggtgaggtgaaggtcaggggtgaggtacctgaatatggctgatggctttgtgcagggagggagaggaggacagggcccctggggtctcctgccatgcctcgtgtctcccccatcctcaccacacactggctccttggccacctggacgtgctgcttggatgaatgtgggtttctacttctccacttagctgggccccgggtgctgtccgcctcttcctttacctgggtatagtttactccttatctaattctcctcatctccttactccttatctctcctggctgttcccagactttcttccctttcctaagctccaacctcagcttcccttggagaggcagagctgcacagcgatgagtggtgagagctctgggagctcctgtggtcctcaacttgccccccatcttcatccaccttccctcccttcctccgcccctcccgctgcattatcccaccacctccttggccatgacttcacatcctccactgtcttctttagcctcctctttctggtctcttctcacacttgtctcctctgcctccttctccatgatctgtaccaggctcaagatttccccatcctaaaacaccccttccttgacccatttctccccacccctcctctccactactattttctctctctcctactgctggtcatcaccaacttttgaaagggtgcactgcatccccctttttccactccattgccagctgctcattccttctcctcttcagtaggaatcccaccacctcccctccctgaagccactggtgtaagggtcactcattaccatagcttaggagctctcctctgttgttagactgcaccactgctccatagcgttcgattctggagcccacgccttatttgaaactgtctcctcccttagtattcatgactctccttgctccttttccagtgggttcttcaaattcgatgttgcagttcagtccctgttcccttgctgtgtcctgcccgtcactgttgaggagtccgtctctttcagacaccacctgagacttgtaaattgctcttctccagcctggatcttctgagctctggacgctcagtttcagttgccttgtcatcaggccacattaacatgtcccttaggcccctctaacttattatagtaaatctaacttattatagcaaagcctgtatcatttgctgcccactccccacacctgttccccatcccgtattaggtgacatcttaggaaattgcatgattatccacttagtcccccaaaccagaggccagagtttcattctttacccctcaatccccatgcaagcagttggccagtcttgttggtggaaaacctcagtgtacgcctcttctttttcccatcccaagacaggagtttgaggtccagctcccactctctctcacttgggtctctttgtgaattacaatataggttcagctggtgtaacaaagatgccccaaataataggcattaaggaggacagaggtttatttctctctcatgaatgccacagtccagaattggcacagtgcttcggcaatgatcagagacccaggctcctggtcttttctccactgtgatcatcatgcagcctccgtcacatggcccaagatggttgctccagttcccatcaccatgtctgtattccagccagggaaatgggagtaaaggacaatggaggccacatctcttccttcaaaggcatgatccagaagttgtacacatttatgcttaggtcccattgacaagaacttagtcacatggccacatctaactacgagggagcctgggaaataaagtccatcctaatgctgtccagctaaaaattgagggtttgttaggggaggcagaaaagactggatttgggggaacaactagcagtctctgccatccatcctaagtgtcctctgaggtctcctaacttcttacgttatacttcacctatccccaccttatcaccagtcatctttttttttttttttttttttgagaaagaatcttgctctgtcacccaggctggagtgccatggtgcaatctcggctcactgcaacctccgcctcccgagttcaagtgattctcctgcctcagcctcctgagtagctgggattacaagcgtgcgccaccatatccagctaatttttgtatttttagtagagacggggtttcaccatgttggtcaggctggtctcaaactcctgaccttgtgatccactcgcctcggcctcccaaagtgctgaaattacaggcgtgagccactgcgcctggccgccagtcatcacttttaaacccaggtagaatcacgcgtgtctcctcttacaaaacctccagtgacttcccactgcttttaggatagagtccaagatccttagcatgacattcaaggcccttgacatttgccctcagcctagtttcccaatcccacttgctgttatgtatcttcatgggccccgtctgtggccacaccagatgatgtgactctttccagaatgctcttccatccctctctagccttttcccctgctggaatgccttccctctctttgcctaccaagagccaatttgttcttccagacccagttcagatgctacttcctccctgaagcttgcctcgtcttccaggaaaatgtattggtctttcctttgggccaccacccagccctttggtagtctaatcagtttatgtgtctgtcttcatcactgagattcagtttcttgatgatggggacaatatagcaaatgtgatatcttttatctcccctcttgcctagtacggcaggtcttgtacacagtaggtgctcagtcagtgcttattgtctaggggaatagacatttttatggatgcctgaaagatgattgttttcttctgatatgagctgaggagaataaacgcagaacacatccctttgggcatgctgtgatatgggcattctgggattgagggttttgcagcaaggatcctgaagcaggtttctacgtgtcaagtgtgactgagtgagaaatggggtgaggctagtccaggcaactgtccaaggagttggctgctgggcacagcctgaccttgctattctcctgtcccttcgctgctcgctagcccaagagcagccaccagatcttttgtctgttcctccagctgccgacttccccatgtgcaagggcctctgcatgagttgcctcctcgtctggatgcctccacctgttgctcatcatccaggtctcaagctgggaagcatttctgaccccacctcagtatagttacaagcccccttgctctgtgctctccaagcacgtgggttctgcttccagcctgtgttacacctcagctttcttatctgtaaagtgggggcattctaggtcttacacccagagcaacatctgtgggcaagcagcgtgggcatcacttggacactttttgaaatgcagaatcttgggccccaccccacacctgctgaactagaacctgcattttaattggaatgcacagcagtggtctagaagacattgattctcagcctctgttgctagttggaatcatctgggaagctttacaagccactgctgcatgggtactctctcccagaaattctgttttaattggtctagggtgtgacctgggtttcccaggtgagtcttttcttttccttttttgtttttgagatggtgggggcggggggcggtctcactttgttgcccaggctggagtgcagtggtgcaatcttggctcactgcaacctctgcttcccaggttcaagcaattctcccatctcagcctctgagtagctgggactacaggtgcatgccaccatgcctggctaatttttgtattatttggtagagacagggtttccccatgttagcgagctggtcttgaactcctgacctcaggtgatccgcctgcctcggcctcccagagtgctaggattacaggtgcgagccacggcgcccaggcttccccaggtgtttctaatgtgccgccaagtttgagacccattcaagggaggggtgctatgaggattaaatgagagagtgcatacacatcaatgcatgtgggatgtgatttttgttattactgttccaaccacaagacacagtacatgttattggattcgtttgctgaaagtgttttccctgcatgatagtcagctccatgggaacagggtgcttattcatgtcatccccttattcattgccatatcccctgcccttcagcaccatacagacacctagtactcactcagtagctaatggctgggtgaatgaacacctgcatgttattaaagacagagtggccagcttagacctcagttactactgtactatgttttaaccgggaggtgggggagagcgggaaggagactgaggttggtggaatgcttgctgtgtgccacgtgcatttacatcattactggagatgttcctcgcacagtcctggaaggtcagtatcatggtctctgctgtactcaagaggaagctgaggctcaggtgaaggaccttgcccgagaccacgcggtagtaagtgtcggagcgcagtctgccttactgcagaatgcagcatttatgtggcgaagctggaactcttagaaaaggaaagtaaaaccctgtgctcaggagcgcatgaaggaatcgtatttggttttctttgtagctggagagaaaagacccctctgaagacaaggaggacattgaaagcaacctgctccggcccacaggcgtagccctgcgaggagcccacttctgcctgaaggtcttccgggccgaggacttgccgcagagtgcgtggggcgcgcccttgggtgggaggtctgcaggaggctggaggcgcagggctggtgggggtgggcgatggcgggcggggtcagctccctgggggaaggagaggcgtctaggaaaacaatcagaatttaacgaaaagtaatcagtgctggtggagttacaaagattcaagaactcttgagagtaatagctgcctctcagctccattccaatgtcctctgggcctggtctggcaatatttggccactctgtggacccattttcttagttctcattgagaagtcagcaccatctggactctattctggccttagggctggctctcactgattttccctccctctgtgaggaagcccgtcctgctagtggcagagctgggctggggagcagttgctctaatgttggaagggtttgcatgaaggactcctgggccccactgtcttcacagatgaaggacacagatccacaaggtgacccaccatcctagcttgcctgagactgtcctggttttagcactgaaagtgcctgttccaggaaaccctgcagtctccagcaaactgggacagtgggcacccgacttgcaaccatctcttcctcccaggaaggccaatgtggccactgcctggtttctcacagtggttggcccgatactagacccatctgtgtgtttagtaaatgctggggagttataccgaatattctagagctctggttatcaacctgggctgatagtagaattccctgggaagattcaaaacggtccaaatgccggggccccacctccagcgttttagattgactcgagttagggcagggctcagcattggtagggtttaaaggctccccaggttgttctgtggtgaggccccgctgtgagccactattttaaagcatgcattaacacaaccaagccactgtccacagcagagtcagtgagaaggtttgcaacttgggtccctggttacaacttttccataaaggtaactatttgagagtttctgcttcggctgctgacgtcaagaaatgaaatgtacaagcttacttagatcaaatcctgaagaaagcctgtaaataagtaatgggtattaattcagtactaaaacacatgcttaaaaatattctgcacttattgattgcaactagaagtgaggctggtgaacttcaagaggggcatggggaaatagaaatgtttgcttttcttaaggtgaaagagctttgtgttgaattccctgcaacgttgtttgaaaaaaacaaaatagatgggcaaacagatcataaatgtttgctaattgttgttgccttttgtattcatgtagttattagctagcgtataatctttatccccctccacttacttacccactcatatgtctgtaaacataacatgctttatacacatatgtatgtgtatacacataaacatatctatctatctgtatctacatatataaataatctggctgattcaaaaaataatggtttggggcagcatagattaaaaactcttaaaaaaaaaacaacagaattgacttcttggttaacctcaggtaaatcgctgcgctaatagatttaaaggaaaatgtcaaccaggcaccaataatgggatattgttataacaactgccagtccttttctgagtacttactgcccttagtgatgtagatttctaattagtcaggcaggtagatttgatctgaaaggctttgaatgcagggtggggacagtgaactgagctgtttgggactggtgacaaagtggcccggagctctcaggagttgctgctctgagacagtcctccttctggggagcccctgggctgagtccctgtgtgaaggggccaaagcttcttgctcaggtagtcccaggactgcctggagacagatgggggacagtcagggttttagaggagagacagcaggcaggcagtgactggtgtgtccctcttcccagtggacgatgccgtgatggacaacgtgaaacagatctttggcttcgagagtaacaagaagaacttggtggacccctttgtggaggtcagctttgcggggaaaatggtaaggagcaagggagcaggagggttctctcgggaggggactttctggtgccctgtggactgtgccgggtgagagcaagacagagtgagatgcccccaccagaggtgtgtgcacaaggagtggctgatcctggtgcgtggtgagacacccacataggcccagctctcagggactgccccgcacacgaatgtggacaggtctgcctgggggtgtcccagacagacacatagatgtggatggcccaggagaggacgttggatggtggatagtagaggaacatttgggggaaaatggagcaatagcatggaaaccagacatgaaggcataaagatagagaaactatattttaaagatgtgggagaaaaacataatggttatttaaaaaatgttgtgggggtagttgggcagagaaaggcccctctggtgggcaccctagcctcttccttgcagcccaccttcctgccctgaggcgggactgtggctccagtccctgctgacttctgtcccagcccttctctccacacaggctgcccaccccccagtgtctgtgcaccccccacaggctttcctggcagccccagccctcccaggcttcagccatcacctctctgcagagaactccgtagctctccgaaccctcccttcaaccccaggcctctctgtgcctctaaacagttccgcctgctgcccctctgagccctggagggagtcattttctctgcacaaactgccccatatccaaaagcctctgtcttaaccaggtacaaccatcaaaggcagaaaatgtggacctgccttgattcttccttcttttttctctctccacatcccacatgctatctctagcttttgactttaaacttgtccccagggcccatccctacctcgtgcccccacagccactgctagctctttccaggagcattcccttgtctctcaactcatggcattgaatttttgaacagcccaggccatttgtccaagtactggatttgttcgattgtttccttctgttgtttaacttgtttctctgactcctctctttcctgtaaactggaagttaggtctagagactccattagattcagatgaagtatttcggcaagaactcagagtagttgatgttctgcatgtcatatggcatcacaacagagagccataatgtcaggttgtcccatcattagggatgatcgcctgatcacacagttaaaatggtgcctccagacagctcccttataaatcttcccactttgtaattagcaagtaaactgtgggtgatatcttggcactgtacggatgtcctacttctcagctacctcttatctaatggtctaagcatccattgaccttcctgtctgaagaagtcatttagttgggactgcaaagtggtgattttctcattatcattctttttctcttgattagccaacatttttttctgtaaagaagagctttctccctccgcttcgttgagtattagtatggacctcaatactttttatttctaatgttaaatcagtcattattgtgttgatgtatgaattatactgaaggtggccatcaggagcccctttgagctgggctctctctcctcagagactagcacagggtcccagtgaaaatgtacacggggatgtaatgcagattttaaactcgttcatgtggaggtgtaaatgcttactgcagatcctcacctgagtgcaggttttggtgtagactcagggtccaggtcttacgccctgcgcctggcatcaggaggaatggggacagctgcttgaaggtaggaaggaaacaggaagctgcggctgtacgtttttgtgggacactagctccaaggactaggattaattcttccacttgacacttgggggaattcacgtcctgagattgttcttatttcgcattcccaacatggaaggtatttcgatggtggctagaaccaagaccgacatgccttcacattcattggaactaagcctcagagctccggggctccgggctgctcctgggtccctgccagcatctttgatctccctgggtcttctgttctgagatgcccttggctggccctggggatttctttaggaaggtaccagtgtctagggggaggtgaaaggacaaaggcagccaaggcaaggcactgtatacagtagattggcatctgggctcatgcaagaagctgcgcctcccatttttcctctagaaggaggtggagggagttgaagaatgaccttatggtgaaggaggcagctggaatgctccgtcttgaaagtttcaacctggccagcctcctcggtggaccccaggcctttgcgtcctctctgccctaagccacctccttgtggcgtccccgcttctgctgctcttatggcgtgtctcattctgcctgtccctctcttttagcctgcttgcatgtcccttttctctctttacaccctaagctgaagagccctgaggttacattctgtgtacccacccaccccagctggccttctttgcatttccccttatggacacctggtggcagtattatccaagatgtgaaccatacttgatttggccaagttcctaagaagataggagtgtgggagagtgtgtgcgactgtgcacttcatggtatggaagaaagaaaaggtcctgccctacttgtagggcaggacaggaagatttaaaacaacttttttttttctgaattcaagaataaaacccattaattgcaaaaaattgaaaaaaatcagagacaaggaaaacaacaaaaactcccactgcaccatattctgtaccctgcaccaccctggagagaattactgataacattggtttgtattacctaccctgttacctcccctcttcccacttgctgggaaaaaatcatgaaaatattgattttccttattcaaggattctgtatttgccaatttgcctactcactaaaatgtatttgcaagcccaaaatcaacactcatggcactttagtgatgatttgtggacactttcagggctttgaaaaatttgagtctcccagcgtgtatgttggttgctgaggttgaacaaggtgactctctgcctccccgctccaactctcatggagtaaacatgacatgtccatgatcaaaggacatgtatttactccacgagagttgaaacagggaggcagagagtctcaaaacatggtactgcacaggacacgtatcaaaggacacagacaaaatgtgtgtcctttgatatgtgtcctgtgtagtctcatgtttttcacatttttgtgccttttcttggcgacttcgctgtttaaaatggccccaaatgtcgtgctgaagtgctgtctggcgttcctcagctcagaaaggctgtgatgtgttttatggaggaagtgcgtgtgataggtaagcttctggcaggcttgagtcacagtgccgttggctgtgagttcaatgctgatgactcagcaatgtatattaaaaagtaaggtgtccttcaacagaagcacacataaaccaaggttacgtattgatcagttgacaaaaacattgtgacagaggctgccaggaatttaaccctgcttcttctctgaggtaatgagtcagcattcactaattcagggttcatggtgaccttatagatcataactaccatgaataatgagaatcaactatatacatgcagtttggtaaactgcttgtgttgtctcatcttttcttaggttattaaagagtcattgaaatgattttttttgatggctgcataatattctgtcagatgagtataccataacatttgacctattttttggacatatataattcaaattttcctcttttataaacaacattgtgacaaacatcagcatacaggaatctttgtccacactctgattgcttttctgtagggaagtttctagaattggggctgttaagccagggggcttatttttaagtatttgatacagatggacaaatagccttccagagagagtgtactaataatactccattgggtagtgaaggaaggtaaagaaaaaaggtaaagcaagaaaaaaagagaagcagaggaagaggaagaagcagcatggtgtggccctggctgagtgcctgtgggtggaacaggatgggggaaggctggcagggatctctggggccacaggcagtgctggctggggtgtggcagatggaccagctgctgttcaagcccccagacccacatcctggtgaaggtagccaggttgaagtgtttgcgatggaggagggccagatgcctggggcaggggctgaagtagcccgtgtgcatcctatgtgtgtgttggggcagcctgtgccttcttattccagggacctggggcacagagttggcagagctgctcagctgggtcttgttaaagtatcttattttaaaattttgtttatctaatttttgaattaggtagtacatttattctatctatctatctatctatctatctatctatctatctatctatctatcatgaaaaatctccctcttgctctgtaccccatccaacaatcaatccatttcttccttttcaaagaaaaccactgcaattagtttcttttatattattctggttttgtgatgcacgtgtaagcaaatatgactacagattctttcttcatttttttttgagatggagtctcactcagtagcccaggctggagtgcagtggtgcaatctccgctcattgcagcctctgcctcctggattcaggcaattctgatgccttggtctcctgagtagctggtactataggcatgtgacaccacttccagctaacttttgtatttttagtagagacagggctttgccacattatccaggcttgtcttgaactcctgacctcaagtgacccacctgccttgggctcccaaagtgctgggattaaggcatgagccaccgtgcccagccgactatagatttttgtcttttaccttttagcacaaatggctgcacatcacaccactctgcgccttgcttttttcacttaatcatataacttggagatggtttcacgtcactacctagaggcatcctcattctgtttgacagctgcctagtactccattgtacggacggaccatacttcatttaacctgctttccattggtggacacatgggttgttccaaatccttgctagttcaagccatgctgcagtgaatagcctcacacatatgtcattcctcacatgtgcaagtatttctgtaggatgggtgtctagaggtaggattcatagggcagtgggaacatgcatttgaaactacaatacatagtggccaattgtcctctgaaggggtcaaactattttgttttcccaccagcaaaacatgagcatgcagttttcccatagccttgccaacagtggtctatcagactttagagatttttatgaatctgatgggtgaggaatggtattttgttggttttctttgtgtttctttctgagtgggatgaagcatctttttatatgtctcaaggccttgcgtcttcattctgtgaactgtctcttccactctttgctctttcttccactggattggatcgttggtctctcttctttccttactcctctctttgctaactaacacaagggccaaatcctggcactcagccccacacccagccctgtgtggcctttgtctggggctctttttacagggaggagggggaaggtgggggcaggggccagcactgggtggaccaggaatggagacatcatcctcacccctggggacctgaagtctctgatttaagtcagatgctcattaaatgagataatgcacatgaaatgcctagcacaatgcagggcttatcatagtaaatgctctgaaaaggctgctcattattttcatgtgtagaacatggaaatctaccaggatctgtgtatctgaaactgagtctttacctgctgcccccgtgtgtgggtataggatccctggggctggctaaggggcctggtgttccttatggactccaaggccagggctggcctgtgagctgctggtttggatctggtttccactcctgtgaggtttcttgtttgggaaaaacctggtctttaggacagggctggttggaggcagactatggcttatagggtttgtatcttcactgaattttctttcactctctgacctctgtgcatggctcccctctcccatctctgatctcctaggggtcacagtcttcctacatggtggatgatctggggtaatgggcaaaagagccttctgggccataagggcctctgggaaagctggtctggactggactcagggcccccacatttagggtcatggccataatgggaggtatggagagggattttcagccagaggtgtgagttaagggtagaagggctgtggcattcagacagcccaccccacccttacccactccccagctctgggtctgaccttccattgagctttgtctctgcaaagattccctgtgtatgaaccccctgcactaggccccaaccccagggtcttacacccagccctaagggcagccagcatggcagagaatggtcactggctggcatgtggccccgggggagcccagagtccccatggagcttgatcaacttgtcccctccctgtgtcttctagctgtgcagcaagatcttggagaagacggccaaccctcagtggaaccagaacatcacactgcctgccatggtgagcctcctgcccccagcaaacccaaggaggcccctggggctctgggcttcgggaggtccagggctcctgcctccccagcatcctgccagtatcccagacttcagctcggggtagggaggggctgttctatcttcaaaaggactcttctcccaacacgcctctattccttcctcagtttccctccatgtgcgaaaaaatgaggattcgtatcatagactggtgagttctgagtcttggagtctttagggcgggctgtcctgagggggcgctgggtccctcagtttcattcggctcagtgactggtagtaagagtgtgagggagaagtttcaggtgaggtaatgtccccttggggtagccagggatggagagggtgtgggcagttcctcggaagcttactcacacctgcttgttgggaggtaggcagataaggaggaatcatctctgagggcagaaggagctgggaaggcttcctggaggaggtggggcaggtgatggcccggcaggaggggtggggttttgctaagctcaccatgaggacattccagtgaggagaggctcacaaactaagggaagggtctgaaaagagcagagcttcagggaggatgggctgcggtgctgccctgggttggtgggatgaaaaagtagggtccccaggctggaggagccgaccagattgcctgagcaggggacaccacggcagctgtgcagcaggtgaggacagcagctcacgggcgtcttagaaagaccacagcatctaatacttgttgagcacctactatacaccaaaccttgttcccagcaagcacttgacacgagtcatctcatctgaccatcaactcaccgacatcagttcacagatgagaaggcaggttgggaaagactgagtgacctgcccgagctgacagctagctggaaagtagctgaggccaggcttgaacccaagcctgctgtttccaaagcctgcgttcctaaccactagtccatgccacctcctgctagttgaggggagctgtctcttacacttgaggggaatattcggggtccacacgtgtgatctcagggcattgggcttcccaaaaagagagagttgtcctttctttgcccccaagaagtcttggctttgtggttccccagcgtgttctcctctggtctcatgcccatgacacccccaaccaggaggataatgagagactagggaaaaacccccaggccacagagccattaagctgtgtgccagttccccaggcctaaagaaaacagcttgtgagaattagaggagaggaaagagagccgccaggagggcctgtgagggagaggccgcaagggcagcgaccacgggtatgtactgtggggaagcggtttggaggaaagatgtgctttacatcccagaatgatctcttcatctccgctctccatgtgtgccgctctgactgcgggcgatgagctgtgcgtgtctctgcgtgtttgcgcatgtggatgtgagtgggtgcggttgtctcctgtgttgtggatgtgtctggcccgagtccgggtgagctgtgtcaaaggcatcggcgtactgtacaatccaaacacattacagaatctggtggttgcatctctggtttgggttgaagtggcatttttattgtgagtctattttcagacttgctgtattttccaaaagcaaccccaagccccaaaacccagctcttggccagaaagcattctgctgcttcaagttcctatccagaagagtgctttcttcccagaaaatgcagataagctcttgttattacctgaatcctggaaataggatatagtccatatggccttttctctgtaacttaatcttccatttaattcttcagaaattcctttttcattaaaaaaccaaaccaaacaacaacaacaaaaaaaccccaaaccaccccctacctccataaaacagaacctctctcctcccactctccttccctcctctcccaattcagagaagactggaggtcagaaatccaattccttttcaagtgctgaccttttctagggtttggtcatgaagactgggtacaaatgccattaactgtcactcatctggtgctgagaatatcactgtaaaatattgcaggaaatttttactttctagttttgtttttttttttttttttttttttgcggggggcgtggtgggaggatggagtttcgctcttgtcacccaggctggagtccaatggcgtgatcttggctcatgcaacctctgcctcccaggttcaagcgattctcctgcctcagcctcccgagtagcagggattacaggcacacaccaccacccctggctaatttttgtatttttagtagaaacggggcttcatcatgttggccaggctggtcttgaactcctgatctcaggtgatccatctgccttggcctcccaaagtgctgggattatgggcgtgagccaccgcaccctgcttttcagttcttattaatatcatttacttggaaaaatgatacagatctgtctgtgctgacaattcattcttcctaatgtagtgccggcgatggaaaactttaaaaatcaaagcttaatcacctccctgggaaatacaaagaggaagaaaggagcacagaaattgtgcagagattagggtaccttgtagggttaggatttcaaagaaaaattgaagcaccatgccagggtatgcctttcacaatggggctgggatgtgtcatctgaagctgcccatggctaaggcactcacaacagggagagggggtctacggggcaccaagaagaaggggaaattacccaggaggaacttcctgaaggagatgggtcctgcccagcccagtgtttctcagtgtctgcatcattggcatttggggctggaatattctttgctgtggggttctcgacctagtggttttgaccgcaggtctagcctacccgggaagcagcaggtggctgcaatcaaagctctggtctccacgtcagcatatctggcctcaaatcccagctttgccatcttggcaaattatttaaccttctcaaccttggctttctcatctgaacttggggctaattgtagtacctacctggtagtgccgatgtgagaatgagtgagttaagtcacctgatggttttagcacagtgcttggctcttagtacgtgctcaataaatgttagctgttactgtttattattatcaaaggaggcaggagtggggttcagagggagggtctgcataggatgtggttggctaataggtgaatcaagcagttaacctccttgagctcctggccacagtcccctaccctggttggggagccaagaagtgtccccctggaagcaggccctatgccatgcaggagcaatgttccaggagtcaggacgccagggcttccggcctgggcttgcccttcctctcctgatgaccttgggcaagtacctacatggctttaagcctcagtttcctcatgggtgcaacagagataataataaaagtgcttgtttctcaaggctgtgtgagcctcctgtgtgataaaggctaaaagtgccccattacatacaaagtcagatacaaaaaggaatcgtgtattaccattggctacttcaagactgtggccttggagatagtttcttcctggtcacctagttttctccttgatctggacatttctttagctcctggagcctctcagttcttcctgggtccgggaacctggctccctgaacaggccagtccctggccctgcctccttgcctctggcctcctccctgtcagcctgcagatgcgtctgtagagatccaggctggcagcctgggtttggttgcctgatgggatgctggtggttggcgagatgaactagttccctctcagagagtcttgggcaaacctcctgtgcagtgtcttcatctctgggattaccaggcctcagtaacataccaaagtgaagaccagaagcgctctctgcctgccccccgcccccctgtgatgtgtaaccgaggccgcatacttcctgggtgggctgtggcctgcagttcctttcctgtgttcaggccctctctgctcccttgctctagggaccgcctgactcacaatgacatcgtggctaccacctacctgagtatgtcgaaaatctctgcccctggaggagaaatagaaggtatgttccctcttcgttctgccctttgaccccctgtgctctcccccgtaccccctctatccagcttacacttctagttttgagagtttgcagaaaaggggagattataaggcctctgttgcccattttccactgagaagagctctggcaatgaaagagatgtcttacagacacttagggttctccacacttggattgtgggatatgccactgaagggcacaaagaggataattcactcctgcagagaatattggctggctgtggccatgccatccatcaggtcctgccttggccgactgtgctctagcagtttcaaaagctattgaaatagctcttactgttctattaaaaaagcaactcatcatcattttgtaaaattttaagtaaagaaataatctgaaagaatataaaatttacctgaaattacccataagcccacccctccggacaagaactattagcactccgagacctttctgtatgtatgtatatatgtatgtatatgtctgtacatgcatggaagatgtgtgtatttaatacatgggtatgtgtatatatacattagaacaaattgttttgaaaattgctttttgatacttgacaatacaacatagatatcttttcctgttattaaaagttcttctataatacaattttaagtgaatacacatattccattatgtgaatgtatcatgatccacgttaactagttaatgatgaacatgtaggtgttttcaaatttttccacattataagcaactaaattggcaaggaatatttctgtagctgaatctttatataattcatgagtttccttttggataaatacctaaaattggaattgctgtgtgaaaagatttcaactttttttttctttttttttttttttgagatggagtcttgccctgttgccaggctgcagtgtagtggcccaaactcagctcactgcaatctccgcctccccagttcaagcaattctcctgcctcagcctcccgagcagctgggactacaggcgcgcgccaccacgcccggctaatttttgtatttttagtagagacagggttttaccatgttggccaggctggtctcgaactcctggcctcatgatccgcccacctcggcctcccaaagtgctgggattacaggcatgagtcactgcacccagcctaggatttcaacatttttaagacttttgatatttatcaaaattgcccttcaaaaaggctggactactttatgctctcatcatgcccctaggcttattttgctataccctccccaacacagggtaaaataataatattaaaaaagaactttgttaattttataggtcaaaatagtatttcattgttgccttaattttcattttattgatagctggtgaagttgaccgatttcaatttgaatatatttaaataattattttatatttatatataacatgtttatataatttatattcattctattataaatgtcttatttatgttctcagtccatatgaggaaatgtttatctttttctcatacctttgtaggagttctgtatatatatggatattaacttttcccctgtcatttatgtagtaaataattcttgttggctttattttaccaattaatagtttttgacctatagaaatttaaaatttttatgtagccaaatctgttagtcttttccttagggaataaggcagggatctagcattacttttttcaaaattgttctttggtgatacaaacactgtattttgagtaatcttttccctatatttcgaaatgctgcctttatcacctactaaattcctaaatgtgttcttgggcctgttcctctattatcttcaattggtatgtctgcttattatttctttggttttgatatctgggttatgctggctttgtaaaattaattgtaaagatttaaagtcttctctaacatctggaacagtttctataacacaagaatacagtcctttgagggtttgaaataattcacccataaaaccatatgggctgggtgccctttttgagtgggtatagtaatagctctttaaaaacttttcaatttctcctgtgatgattgttatttttagtttgtcacttttactctagtcaattttgataatttatattttcctagaaaagcatccattacgttgaggtataatttatttacatagtgttgtacagagcaaatttttataatttgaataattctctctacctgtggtgttttactttttcttatttctaatgctatgtatttgagtttttttttcttgattagctggttagaagtttattttaaaactttattggacttttaatctttgcactctttaactgtctttagactgattttattgtttccttctttaactttatagcttcttgtctttatttttaaaatttcttatttaaataatgaaagtatggtttctgccttctgtgtcatgctcaaaccctaaggttcagcagaccctaaggttatatttaactctattaatttttttttaacatttaaacatttgatctattttgaatttatttttgtgtgttttctgacagcagtctgatgtgattctttcatagttagtctatttttttttcctgactagatgctgctcataggaatttatcttttttcttatagtttagaaaattattttaatctatcttggtacaggacactttccattgaattttgtctgagacatgatgaattcttaaatccgagttgaggattgttttttaaaaattctgacattatgccatggacagctgaaggcagagtgggggagtggggagagctctagctctccagcccaccaacttgggttcaaatgctcttggctctgcttctttgtaactgagtgagttgctccagtctccgtaaaatggggctcttacaagtcccaaccctcatgaggcggttgtaaaaatcatgaggttataaaagtaaggttcttataatgtctagtacacaataaccttaaagtaacatttgctgtttatcatcattaagatgggctttctatgttgctaatctgatttttttctgtaccaattctgccttttactgcttcgtacatggtttaaaatgggctattgcatttgtagtttcttgtcaagccttctttttttttttttttattgatcattcttgggtgtttctcgcagagggggatttggcagggtcataggacaatagtagagggaaggtcagcagataaacaagtgaacaaaggtctctggttttcctaggcagaggaccctggggccttccgcagtgtttgtgtccctgggtacttgagattagggagtggtgatgactcttatggagcatgctgccttcaagcatctgtttaacaaagcacatcttgcaccgcccttaatccatttaaccctgagtggacacagcacatgtttcagagagcaccgggttgggggtaaggtcatagatcaacagcatcccaaggcagaagaatttttcttagtacagaacaaaatggagtctcctatgcccacttctctccacacagacacagcaacaatctgatttctccatcttctccccacatttcctccctttctactcgacaaaaccgccatcatcatcatggcccgttcccaatgagctgctgggtacacctcgcagatggggtggcggccgggcagaggggctcctcacttcccagaaggggcggccgggcagaggcgccccctacctcccggacggggcagctggccggacgggggctgccccccacctccctcccggatggggtggctggccgggcgggggctgccccccacctcccggactgggcagctgccgggcggagacgctcctcacttccagacggggcggctgccgggcggaggggctcctcacttcccagacggggtggctgccgggcggaggggctcctcacttctcagatggagtggcccgttagagacgctcctcacctcccagacggggtcgcggccgggcagaggcgctcctcacatcccagacggggcggcagggcagaggcactccccacatctcagatgatgggcagccgggcagagacactcctcacttcctagaggggatggcggccgggaagagacgctcctcacttcccagactgggcagccgggcagaggggctcctcacatcccagacgatgggcggccaggcagagacgctcctcacttcccagacggggtggcggccgggcagaggctgcgatctcggcactttgggaggccaaggcaggcggctgggaggtggaggttgatagcgagccgagatcaagccactgcactccagcctgggcaacattgagcactgagtgaacgagactccatctgcaatcccagcacctcaggaggcggaggctggcagatcactcgcggttaggagctggagaccagcccggccaacacagcgaaaccccatctccaccaaaaaaatacgaaaaccagtcaggcgtggcggcgcgcgcctgcaatcgcaggcactcggcaggctgaggcaggagaatcaggcacggaggttgcagtgagcagagatggcggcagtacagtccagcttcggctcggcatcagagggagaccgtggaaagagagggagagggagaccgtggggagagggagagggagagggagaccgtggggagagggggagggagaaggagagggagagggagagggagacggagagggagagggagacggagagggagagggagagggctcaagccttcttttttccctgtcactccttttatattttcctttacttctttgctcctcgtctgttctctcccggcagttctgctttgttccacaaaaactacatcttcttgtactctactgaggattccaaatcattttctgtaatatgcaggtgaatgctttcctgaatcttatggatgtggtttccatatcctggttggctctctgccctctccctgctttattcactctcccacaagatctgttcagtgttggtatctctcacagatagggtgtgtgggtctttctctgtccatccatctcctcagatctttagctggaggacaggttaacgtgcccagtttctggccgactctacccagtgctcttgaagctggagatcgtctccagattctagatctgtaggagacctctaggagttcttctcctagaagaggagactggaggagataccatttttaaaaatgttctttttttttttttttttgagatggagtcttgctcttttcgcccagcctgtagtgcagtggtgtgatcttggctcactgcaacctctgcctcctgggttcaagcgattctcctgcctcagccttccaaggagccaggattacagttgtctgccaccatacctggctaatattttttatttttagtagagacggggtttcaccatgtgggccaggctggtctcgaactcctgacctgaggtgatccacctgccttggcctcccaaatgttaacatcgtttttaagcaagacattgttaacttagacttctagctgcttgatgtcctcagatccttccgtaaatgtaggcagctatcagaggcatgtacctgacattgtttttcattcacttcattcttttaggagatgcttattgaacatatgccttctgtcaggggctgggcatagagggttgaacaaagtattcttggtctcaccctcagggaacttagagtcctggcaggcgacaaacaaatagacaaataaaaatatgggtataagttgtcttaagtgccctcgaagagaaggacatgcatggtgaaagagaataacagagtaggggagagctgcttctgcctgacagaatcaaggaaggcttctaggaggaggtgtcttaggctgccagaggggaagccaccggcacgtgaggagtaggaaagagttccaggcagaggtgatgacatattccaaggccatgtggcaagaaagaaatgaaaagactggtttggctgagttctctgaaacatttaaagggcaacttttaattatagaaaatttcaagtacacgcaaaggtagagaattgtacagtaaactcccagataccctccctgagcttccacatctagctgctctctgccttctgatttccttgttggaactttggactagtcccagaaacgaccttcctgaaggcactgcgaacttcctcttcctgccccagcccctcccttcctcgctgggggaacaatctgttccgggatgtggccccttcactaattgctgttcagatagtttctaaggagggctgtctcctgcacaggtagagagatttgggggtggtaatgcagacagagggtcacctcacaggtcagtactcttggtatggaaggaacctcgtcttcagttttctgactggcactgtctctcatctctcaatccaggggcagacagtggtgggggcacactgtggcatttctgactgttttccgacagttgtgtttcatgacgctgcagccgtgcctaccaccagccccctgatggagagttaacatcccccgacctgtcttcatttctatgctgtgtgagccctcacctttctctgtgtccgcatgagtgtgttggtgggaaggtaagaaagatgtttatgtggtcactagatggcgctcaggtcacgggcaacccagcatgctgcggaaggcattcaaagtcgggaccaccttccatcacagatggttctggaaagaaatgagaatcttcttgcaaccagctaaccggttttgaacatgcagttaaatagcttgatttaagtggcagtaaaagagttaaacttgtgcatccaactggagctgtccttgatgactctcggactctgccgacccgttcctgcagaggtgggtccctttctggggccagggcctctctccggccttgaggtcgggcccttgccttgctcgggccaagcctccccgacttgcctgcagccccctcagaacgcgtcgctccaactttcctttcagcccttttttatgttgtttctccacgttgtgggcttgtagcccattggggtgatagacaacacttctatttcctcactgctctcaaagaccaaatgaaactgaactgtaaaaacaagttctttctctgtatttccccgcctcagggttcaccagatgatttggttcaactagcagtttttgtttttctgtttttgtttttgtttccagtgagggcaagacctgacactaaccttttaaacacctctgcccacaaatttgcctgggcgcactagagtgttccttggaccctgtgctctgaagtattaagtaagaattttgttttttaaaaaagagtgctttccttagaagctgcaggtcttttgagaggtaacaggcacgtgagctctgtgaaacatacacagattctttgataactttatacataggaaactcatgctccataaatagcacttgtatcctagtgttttccatagttaagaaatccaaagttagtctccttttgtctctggaatgtagatgatgctgatttcccagcagttttcagtttctcctcttgcctggcgcaagcgagagtcaggcagccagccgccatgggcttggggatgtgccgagaggcagagggagctggcggggcagaccgcaggtgatggcctcagcttcttcatgcatgttccggggactgtgtgcagggctgggacttgtggctcactgggctgggaggtcctgctgtctatctccttcagcttcccccaggtgaggcagctgggcttcgttgctcgggccacagaactgggagcattcatctgtgttttgggcttccacagccccagcttcctgggctgagggaaaacacaataaaacacttgtgttttggcagaacggtgatgtggactaaatagaggctttgtcttgggtggcttcactggtcactgtgctcttgaactgtctgcagacacaggggcgagagcccgggatggaccttcacacccagagactgcgatccgcccccaagtcaggagtcattgacctaagacaccaacagggctgtgtcttattacacattcccagtgcctcctcctgcacctggttaggcttgctgaatgaacaaatgaatgaaagaatgggtgaattaggttgggtgctgtggctcacacctgtaatcccagcactttgggaggctgaggtgggtggatcacctgagttcaggagttcgagaccagcctggctaacatggtgaaaccccatctccactaaaaatacaagaaataggtggtggtgggcacctggaatcatagctacttgggaggctgaggcagaattgctggaacctgggaggcggaggttgcagtgagccgagattgggccactgtgctccagtgtgggcaacaagagcaagacactgtctcaataaataaataaataaaaagaaagaaagaatgggtgaattaatgaaaaggtgtggttgcgaggcaggctgcttcgcagccacccacttgatcctctgagccaccagagccatgtgttggtcagatggccgatgggattagggggacatctgcatctgggctggacaccagtctgcagccagaattcaaaatcagtctgggtgggaagccgactttgcctctgtaagaagcacatgggggttggaactgtgaccttggcctcattagcccgagataacgggccaggcctgttagtaatcatttagaaggagcttaaaatgtgatctgtttgcttccggtggtccctggccactgctctcctcgggcctgcagctgtgtctgtgttggccctctcgctgttgcagaaaactccccatgagcagagccctggctcgcccacagaaggaaacctcttgctttggagatgaaggtgaccatgaactatgatttttgcagccctggtgtctgctggctggcattcatagctgaggcctcgctgaggagggctgaggggctgggccgggccctccttgctgtctttgccctgtcctcactctggatggccacgctcccttctctcttctccactctttctgtgtctttgtgcattcttccttcacaaagttttcctcaacccttgacttctgactgcagtcacagagctaggggcaaaacgagtgttttctggaggacagcaacaggtaaaggtgaacaaggaagggaagtaatcagcaagttcaccaaccacatcccgggtgtgcacgtgacctcagactgcgttacactttactgttggagaaggagaatgggaagatcagatttgggaagaggcagaaatcagagaggacagtggaggaagactgaggggtgtccgtttccttggcgcatcgcatacctgcctagcagtgagggacagattcagagtccatacatgtgccagagcatttccttccgtgcttttcttatttctagacattccttaccaacattcaggggcacacccaagtgtgtagcgtgttcagcttgtggacagtgtctggctctgtgattccctggaagcggcctgtgtcagaagccagatgccagtgcctgctgttgtgaaaacgcaacgtggagccttcaggggggtgatcctggacacggccactaggtggagatgttgtgccttgaaatgtccctgctcggcgcgcctggtcccaagcacgacctgcctgcgggcttggagtgtggggtgtgccttgctgcctagctctggcccttttgtgtctccccaccctcccgttgtgtctgtactttgttcccctcacttatctggctatcatatggaaaagcacattttcttttctgaattattccttgagtgtattgaatcaagtttcgggtctggttttcaactggcaaacggaacacacagagtgatgggcaggccaggtgggacccccagggctcatggggtgttgggggctgcgtctggaggggccgtgatgatttagtttatgataaattcacagctgggcagagggtggggcctcgggccacatctgtttcacacccgggagctgtctttccatctgtctgcctgccagctctccatccacagcctgttcatgtaacccgtccttctcccagccatgcccaccctaaccccttttccatttctttacgcttcagaggagcctgcaggtgctgtcaagccttcgaaagcctcagactgtacgttgctgtcaccttggggacaaccaggggagtggggccttgggttttggctagaggggcgagggtgctggaggcatggggtttttgatttgcctgaggtgggattgagattcccccacaaaggtaagtccctggacttacctttgctgtcacctctcggcctctgtggagcatgtaaatcatctggaatgctttaaggggcaatttcctcccacttcccccaacccttcctaaatgggataggcttgggctgatgctcgagttagaccactctgtctggtagtgaggggtaggggcaggcatgggggtctggagtggggcagggggagtgtgaggtgtttcaggggccaggaggaggccaagaggagttaaaaactcttggagttgaaatccccaaggtaaatcataattgagatgattaacgcaaataattagtaatgctcctgttagcccacctacctgggcctcccacctctcctgaaggccagtgccctgtctgtgctggggtctaggagacagaaggtgttgaaggaggtggggaggcccctggctgagaggggaggtgaggctccagccttctggtccctccctgtcctggccccttcctcatccctagggtctgggcaggggctcgactcacagtgcatgaccttaggtctagctcaaacgcttctttgctgaggccatttgttttgtgcctactttggcccatccttgtgtggactgattgggtcgttccagagggttcctgtctctggccctgctttctacctttggcattttggaaacaacctcttccccattcctctgaaagggacactgtggcattttagggttttcagagcatggccagtaaagtcccatctgggaaactcagctgtgagctggaaaatgatgttagtaaaagagagcctccagaaaaggatgaaagaatgtggagagatttcccctcttcaggagtgtaattctcgaactctcctctgacctgctctgttaaaaaattgttctttgtacaatgtgtgtgtggggaggagattctgggataaggcaaggccgttagggcagagggtatgtgcctgggggctaccctagggaggaggaacggctagctgggctccatccctggcctcctgggagatggtttctctggttaccgggctctgggacctcttagcccctccccattggctgcagggcctacagtgcctatagaagcgtaggatggagagcacatgcaggacatgctgggggtggggctggggaggggcacgagcagtggagggcctcaaaccccaactttgtgtgctggctgagtgcatgggctttgaggtgacaccattctggaccctgccaccttgtagtcttgtgtttctttgcatctccaagcctcggtttcctcatctgtaaaatgagactaataaaaatatgattgcatctcagcatgatggtgaggagtaaagagacttaggggagggcgtgagagctatcgctcgtggcgttcttctttatacactgacaggagctgcatctggtgcatgtgggggggaactgagggccaggggtgggctcaggttggaaggtggctgggtggagcattgggaagccccactgggccgacccctctgattgccacttgtgtctcccagtggatgactacctgggcttcctccccacttttgggccctgctacatcaacctctatggcagtcccagagagttcacaggcttcccagacccctacacagagctcaacacaggcaaggtaagccggctggagccctggcaagggcaggatgccagatgcccaggtccctcaggagcccaggcctgcatgcagggtcttccagcccctcctgggggcccacgacctggcagccaacccctcagggagttctccttctgccccttgacactgcctctgcctgagtgccagtctgatccttccatgttcctcgccttgaagcacccaggccccgtctctctgtctttgtcttttaggctgagttggcatctggcactgtccatctgggtggcttgtcatatcccccgaactctctgggccatgctttcctcacctgcaggggggatgaggttggctgagggacctcctgggtgcctgagagatgagctacctcagggccagagggtgcccctttccttcccctcctcccctctgtctcccctgctccttgtgacctgacctccctggcagggggaaggtgtggcttatcgtggccggcttctgctctccctggagaccaagctggtggagcacagtgaacagaaggtggaggaccttcctgcggatgacatcctccgggtggaggtgaggggtgtggctctgggtgggagctgggcgtcggggcagggaagggatggccaggctgggactggccttgaggtgtcatggccgagggaggaggaagctctgcccacacgcatcgtgcctttacctccccgggcctcaagtctcagctgtaaagtgggaataaatcaacacttgccctgcttccctggagggatgatcagaggctcagagaagataaatgaaaatattcaaaaagtctagagcttgatgcaaaatgagatgcgattttatattaataacataaggatagctaactgttaagtcaaataagcactgaacatgtatcaggcactgtgctgctgacacctctgccattactgactcctcccagcaccatgaggtggctgctgttattattattatccccatttcacagatgaggaaacaggctcagatatatcagaggaacaaatggtagagctgggccttgtgtccaggaggtagctgtgtggagtctgtgtggtgctttaagctcttagacacagtggtcagatcgctctggtttgaatcctggctctagcacttaccggctgcatcagtttccctatctggaaagtgggggtaatgattatacttatctcataagacagttgtgggaattaaggaaattaatacacatatgcagtaagcacttactaagtgctagctgttgctactatttacattcacctaacacccaattgtctgacccctcttctctcagtcgtaggattgagttcctgccctgtccccatcccgtgctcagagcctggaggggacaatgagaccctttcatcccaggcacatgacagtggcagcccgtgtatcctgaagagctggctgctgagggagagaccctgagtggcatggggcaggagctctggtcaggcgcctggtggcttaaaagccttaagcccctctgaatggcagataaggcccgggttgcccctgcgggcccagtgggagcccccactcagctgatgtggtggtaccatggctgctggtttggattaggggcagcttgaccttggaggagtagctcttattagggaaacgtggccagacacatgcagacctggaatgagcttgttcagttagcaatgaaatctggatgctgtttctttcttgggctacttgccacccgtcagtccagccaggagctattgggtgccggttatggccggggcctgccagacgtatgtcccctccccagcctgggtgcctttctttgctcctcccgtgaccctctggtctactctctgctctcagaagtaccttaggaggcgcaagtactccctgtttgcggccttctactcagccaccatgctgcaggatgtggatgatgccatccagtttgaggtcagcatcgggaactacgggaacaagttcgacatgacctgcctgccgctggcctccaccactcagtacagccgtgcagtctttgacggtgaggcagtgctcctggctgggaccccgatcacaggatcatagagcagggggccacaccttaaatcccgcctcccatggaaagctgccagagtctactcaaaggccctggtcctggccctggcaaacctgttccagctgtccccttgctctcctccaggcaaggggccctgctactagtgcccacagatgcagctcctgggaccagctgtggtcagcattgaccctgacccatcctgatcatttcaaggagtcagccagccttggtttggacattttagggagtgtggccttgggtttcccagggcagctctaacatctcctcagttttgacatgcccaggagccctaatgagagctgcagctgtctgctcaactcacgaagggagctcaggcacctcttcagacactagggaacacgggtacgggccactccacgtgtccaagggggttcttagatgggaagggtgagcaggtgcctgtctctgtcccacgtgtggtccctttcccagctctgccagtcctagccctggagtgcccaggaggctggcactcttagcaccccatcccacccgccctccactcctggcacagcgctcaggcccgtctctccattccagggtgccactactactacctaccctggggtaacgtgaaacctgtggtggtgctgtcatcctactgggaggacatcagccatagaatcgagactcagaaccagctgcttgggattgctgaccggctggtgagtgaaaacttgcccaaagctgcacatgcctatgcatgcacctgctacccccgctgcatggggtgtctcagaccaccacccactggtgcacacactgacacacggctgtgcctactgacctttgtggttggtgtcctctgtgccttggcaataccaggcttgtggtcctgtcctgcatgcttggaagagaaaagaggggatgtgagcaatctgaggcagccccagtgtgcagtgggacacagagcaagggagcagaaggaaaacctatgccacgcagcagggcacggcctggctctcgctcgcttactcactcattacaggcctttggactcgtaatgcacacaagggcttgtgctagaaacttctagccagaagctagaggcgagaggtgagcaagcagttggctctgtcttcagggagtcagtttattaaaggagggcataggctcacttgtgcctctcatacagggctttccaaacttaggtacaggtgacattccaggggcaaagagatgtggggctccgagcagggcaggtggccaaggagcatcaggaaggcatcataggccagtgagggggctgtgtccagtgcaaggagatggggggtgggaacccagctaggccaccattgcagggacctgggggagggtgaccaagccctgggaaggagatggccttggggggaaattgcaggacttgagctacaaggccttggtggccgactggatttggggctgaggaagggctataaggaggaactcaagtggctggggaattgggaagctggggagaagagcagagcatatgaggtcaggttctgttttggaggtgaggaggagccttctggggaaccccctgcagatgctggatgctgcagtcctggcacttggccagaatggaggagaatcacaggtgggcagaggtgtagaggctaagggaggtgaggaggctgggcgggaagctgatggtcctggcagtggctgtaggggtttctgtggcatggatggggacagctggtgagaaagtggaagagacatgtgcaggccctactgcaggagcatgctcagatcagcaggtggagggaagggggactggagaggcctgggcgtgtctgtgggtggggaggtgagcatggcttgaaggaaaggtggacagagaagggaaagaggccatggtggtcccaccttcccagagactggcagctctaggggaaagaggagaccagcgaatgctgagatggggagaacatggagttgatgctatatagctccagtatctgccttctgggcccatcactggctcacagcaagactccagactccaagagggcagggaccgtgttctttccagttctacgagattggtagtccaagtcctgagcacgtgtccttgctcaggaaggctgctgggtggggaggggtgtgtcgggggctgagggacagtccttggcctctcagctcagggctgaggacccatggagagggctggagaagagctcggtaagggcctgtttccctgggaggcagcacagggagtgagcaggccacaggagtttgaggaaggagctgtctgtgattagaggtggcaggacgaatcctggaggagggcgctcttagtctgagcctcattgggtggtagaatctggaaaggagagagggttccaggtggggaaccagagcaggctcggagagggccacttacctgtgggaagccaggcctggtttgaggtagcagggaggagtcagaagccatcaagttctgcccaagtctgcagacaccccctgagctcctcatgactacatgtgaggctggagttacaggcatgagactggatgtatttgggcgtggggagccttggaaggttcttgagccaggatagaccctggtttgttgggcctggactctgccttctttgctctaactgttcactcctttttggttcagtagcagtgacaaggcctgggggttgggtccagcatgcaccctctgccctgtggtgacacacctgacccttgcctgcccattccacaggaagctggcctggagcaggtccacctggccctgaaggcgcagtgctccacggaggacgtggactcgctggtggctcagctgacggatgagctcatcgcaggctgcaggtaggggggacctggcgcccctggtgcccacctctcctggctcaactgggcctgtttcgctgggagtgctcgtgtgtggcagtgagcagtggcacgtctcccagccacgcttggccagcagtccagcccgtgctgagtccaaaggtggtggagccagtgcaggagttgaaaaggtgacattgagagcaggtcataaatctccctgcagcagcggcagctgcgggcccggcggccggctcacctgaatggggagcattgtgtctctgatccccgacctcttatttccctgatggaatctccaggaggagctggctggggggtggggtgacggcgcccctcattccctcaaggccatgtcggggatcatggtttctgtttagctttctattgacatggctgattgttgacttcaggaaaaaagggcccggggtgtggaggcccagcagaggggtgcatctcacatctcctctgctgccatgtggttttggggagccacccatgggttttgacccttggttttctcaacttcaacctggcatgaagaataactactttataatatcttctaaacaaagtgcctggcccttgggaaggatttaataaatggtagctataattattgctcagaagaagaaatgtcaggagacttagctcctggtctctttatctgacttggtaactttgggaagcttctcttctctggactttagttttctcagctgttaaatggacttaaataattgcccctctgctctccacagggttaatatatgcaaatgtgtgaatatatgcaaatgtattctatgctcccatacgcctcatcacccctccctcagcctggctgtacagccctgctgaacgcatctgagaaactgataaccatggtcactgatccagcatcccttctattgtttgtggctcagttaggaagtgtatctttatcaaaatattaccccagagaaatgctcccggcccagtagtggaattccagacaggccattcacccatttcccccaaccttcctgaagcctggcaggctcagtgccagatgcccagagcatactgacaaaggtacaacttcagccctccagggatggttggatgcgaaaaatgggcagaggaggtaaagtgcgttaggaagttagaggtgagcactgtaggagctctaagcaggtgcatctcattcccacaaattgaattcagggaagcttcctggagaaggggatgccccaggtggactttgagggaggagcaggagttagcctttggagaggggactgccagggcaaaggcacagaagcctgaaatgcctgctgcctcctgggtgggggaagtggcaggagaggctgttgcccaattgggcggccccgagggtctctgctaaggagagctcagccctgggagcaaggccgagggaaaggtgatcccagggtctaaatgctgcaatgtgaggaatggactggtggtggcggcgaatggcaggtgctgggaccaggggaggggagactggacatacggcaggtgagctgtgatgatggtgtaactaagacagtgatagtgggaggggtgggggctagggcagcatggactatttaggagggattatgatgacaagcagtcttctgtgccaggcattgtcctaagaattttacatgtattaaccaaccatgaaatcttatgaactagaaagtaggctgggtgtggaggctcacagctgtaatcccagcactttgggagactgaggcagacagatcacttgaggtcaggagttcaagaccagcctggccccatctctactaaaaatacaaaaattagccatgtgtggtggcgggtgcctgtaatcccagctacttgggaggctgagacagcagaattgcttgaacccaggaggtggatgttgcagtgagctgagattgtgcccctacactccagactgggtgacagagcaagactctgtctcaaaaaaaaaaaaagtaaatgaccctcgttttacagataggaaactgaggcacagagaggttaacttgcccagattcacacacctggtgagtggcagaacccccttgctgtgctgctctgtaatggacagaacctgatgatggggtgaatatgggagccacaggagggttcagaatgatcccctgatcctggccaggggggctaggtgggcatgggggctgtgctctgagagggtcagcaggaggaggagccagttgagggggaggtgaggcattcaggacaggctgtgttgaggtatctgtgaggaagctggcctgtggtctggaggtgggaggacagagtggggttggaggggcacatatgggcacggtcagcctgtggtggctacagccactgggtgagctccccagggcatccccggggccccagatcccacctgcaaggtgactcatggtgccatgttggcaccaccttgggtgaggtgggtgggccaggactctgggttctacccgtggccctgcacatgacccccgtgttgtttgtagcttggcaggtctgaggagcctggaatatctgagacctgtgggccctgagtccttggctgccctcagtgacctctgcagggctctgctcttggaggatctgcctacaaacagttctggcgcctttgagtcactctcctggggttggaagagtggctgggcctcccagcagggaggctggttccagctcaggagcttgggaggggaactgggttcccgtcctcttgagaatgcataatgcctctctgggggggaattccaggcagcaggagcaattcgctcagctccacctgaggccactgagtggcccagcacctcagctagagggcttcctccacctctcactgcagtgctgagcaccatcacagctgataggcagagcagccgggcatgggggccctgagcgaactcaggcccatagctgaacacagcagctcaccctttctccagtcagcctggcccacttctccagcatcggtgttcctcattccatctcagcccttttcccggctcatcttccgggagcctcccccttccccagggctggtggtgtccactctgttcctccagcccagccctcttctctgatctctagacctatgaacccaaggtgctggacatgtccacgtggatgtcccaccagcacctccgtgctgcgtctggggctacacatgttgcagacaggtttcatcacctcccagcactgtcttttcctgggtccccagaatccacgctggaaacctgagccagctctgactgccctcctcctcttttctctgccccagccctggtggctctgcctcacccatgtccttcctccttccttcctctcccacccctcctttagtatccccatcgtcttcaagctgtgtcatgcctgcctccatgtcagccctgcagtggctgctgctgcatccaggaaaagcccctgctctcatcctggtggacaggcctttctgtccccaccacctgcctcacggagccctaacgcttctgaagctctgcgctagtttgtccggccctcagcacccccacccctacaggctcccccttgcctctgtgtctttgcacttgtgcacatgctgctccatcagccaggacgcccttcccactctttgggccttactaacgcctgctggccctgccaggtgcagctcagggccacttcctccaggaagggctcctgactctgaggctgctcaggtggggatctgtttgcgtctctgttctgcggacttcctgagagcagggccaggtctcatctctggaggcagcatccagtccaagcccagggcagagctgttgctcactaggagtgaaatgaatgccccgaggccagttcatctttcaggccggacactgcccagggtacaggtatccacctggccccgcagaggcaggcagggaccttgggagcagcccagcccactctgctctcagcctgctgagccctgcgctgggcctacctgcaatttccaagtcagccggcgttggcggggcccctggctttgcttagggctgggtggagcgccatcagcctcctcttcccggtctccccttctttccgtaccccctgccttgggctttcctgaggagggaaagagccgagacagcacggagacagcttgttagtggcactcacaggtcctaaatgtttcttggggagtcttggctgggctgtggcctccatgaaaatctccctttggtggtctgtactgcagcccctcccggctcccgacccgggctgggcgcataaatcaccctggttggctcggctctccctatccctctccagacccgcttgcccccgctctcaggcccactcaggcctggttcccaggcaggcccccgccccgctacccaccgagcatgcccctccaccaccgaggagcggcctggggcagcccatccgcggcaccctcggggcagtaaatattatattactacagggtgtgcagtacgtgacctgagacaggccccggggcttaagtttcccgagatggagtttgcgtactgctccccccatcctaaaaattcaattaaaaaaaataacaggaaaaatgtagtgcgccgagggcctgccagagcggtgtatctggcggcggcggtgccgctgcgctccggcggtaattggttctgcatagctcggggaaattggcagaaaaataaatcagccgggagccgggagtcagacgctgcagggaggggaggtggggggtgctgcaagtggtgggagcagacctggtggagcgggtttgactaatgtcctgtttgggagtcaagggggtgaggtgggggcagggcagcccccataccctcagtggagaatggaaaatggagaggagtcccgcttggttagggagtgcacagactgccccgccgcatttctgcatggcccttgtgtgggtaccgacccctggccttggaatggcgaggaggagccatatgaaggactttcagggcgcctccgtgggatgggggaggtcagagttctttgcctctaaacaggattgagcttaaacctgacctcctgtctctcagggctcagggctgtgtttctggcattgcatgtaccccccacctcctctccaaaggcttcccaaagcagagtgttctgggaagggttctgttgtggctccccaccccacctcaggtggatacatctgagctgctggcctccctgcagtgcctgcagtagctcttcaggggttcctaaatttcttccttgaagaatgtggacacagcacagagcagacttgtttcagtgcagggcactcagcgctggagcctctactctaggaggatccaggaggcaggagcaggaccccctgggccctccgagagcctgtagtcagtggggcagaggggaacacacatgcaaaagaactcactggactggagttgaggacagattccaaactggcagtcctggaatcgagggctgggggctccagatcaggaggcgcgtaggctgacatgggtgaggaaggcttcctggaggaggtgagggtggagcacatcacatagagatggctgtgtgtgtggagcgggctggagaaggcacccagcaggcaggcggagggggtggggcctgctgtgagaacctggcacatgtgcatgcctggacctgggagagccctgggctcatcaggcgcattccatctgtccgtccctcacagccagcctctgggtgacatccatgagacaccctctgccacccacctggaccagtacctgtaccagctgcgcacccatcacctgagccaaatcactgaggctgccctggccctgaagctcggccacagtgagctccctgcagctctggagcaggcggaggactggctcctgcgtctgcgtgccctggcagaggaggtaattaagcctgggggtgcctttcttcttctgctctcctgctgcctggaacatcagaactggcagggacaaggcgaatgtctggattattacccaccccggttccattgctgggtgaccttgggcaggtgacttaacctctctgaacctcaatggaccaatttgcagaaggaagagagagggtacgatggaatactgggtgttatggggcccagcacagagcctggcacacaataggtaactaataaatgccctctgtttgccaaagtatgtcagagacagagctgggaccagaatccaaggtacctggttctaggttcagtgccagggccagcttccccaggttcccgactcctacttcctgccagccagtgcctgtctgcacctggccaacaacctgccctgcctggaccctctgtttcctgttgtcctggatgcctctgaaccccaggcccaaggaggcttcattttcagtaactctgagttttgctgaatctgatcagagagaaccggctctggtttgtctttggggaactatttccccacctgcagaccctccccctgaggtctctgtggccagatgcacccacccggttctgtggcaaataggcaggtccggtatttgtctggaatgagaagcgtctgctcataagtgttgggcagacacagctgctgcctgctctgaccagagccctgtgggactcccagggaggaggtaggggctctccccaggagtgtgagaagggcagggccaggagagcggttgctggaggaagctgtggaaggggagagggaggctgctcaggaagggatgtgggtccctggagtcagcagggcctataggcacaggctggttccctggtggacactgtgtcgctcagctgtggaccaactcctcacagtggcagcagaccaacccctcaggctggtcacgggcttccctctgtaatctcagcccagactgacccgtgaactgtaagcacaaattgtgatatggctggaaggggttaaggtcgaacagtgctgtcactgtaagggccccgtggagagagcccttctcaaacttgcatgtgcatcagaatcccttggagggcttgtgaaaagcaggttagggcccacccctcgagttcctgcccccctggaactggggcaaacctgaaaatatgcatttctaacaagttcctggaagctgctgctgctgtgggtgccacactttgagaacccctggtatagtggttaggaacacatatttggagtcagaaaaacctgcattggctcctaagctctcaaagcctgaatttcctcacctgtcaaatggggctgcctgtcctgcctcctgggcttgctgttggggttcagtgaagcgacgcatgggcatgcttcacctgtgctgcaggagcatcagctcagcaggaccctgggtggagacctggggctcacttgggctcactttgctcatcatccttggaagcaaatggacccttacccaatcagcctgctctccagagtgtgcagctgggagcagttgtcaatcatgctggaggggcttaggggcctcacagttttgttctggactagtcaccattttcagagtccagtgtcttcaggccatgggagtcctgctgctacgggaggagggtgtgtgtcctctgggaagggcataccttctgtggatctgttcccgctcttggggctgaggaaggcgggtggtgtcctaggcgtaatgttacctccctggtcaaatctagttctctgatgtttgccccctgggaatgtctacctggtagcgaggacctaagaatgtaaggtttgaggtccaggcaggagtgtctcttcccagaaggatgtactcagctcagtaaccttggtgggcttctcatgtgagctgggggcagccttatgctctgttctctgggggctcaccgccactcaagccagacactggccagccctgggaggtctgggggaaggccagggtggacagtgtgtgggatggaagctgggagaggagaggcctctgtggcctctgagtcagaggtcagctcacggtgtggctgtggggcgtgggcctggtgtgtcaccatccccaccccgaccaccaccctctgttcagccccagaacagcctgccggacatcgtcatctggatgctgcagggagacaagcgtgtggcataccagcgggtgcccgcccaccaagtcctcttctcccggcggggtgccaactactgtggcaagaattgtgggaagctacagacaatctttctgaaagtgagttttcttttttcccaagtcatgatcgtatttttcccaacataaggcctttctcccatctcttctgtttcccctcctgttcttgacctatcttagttcttaggctgtggtcttggaaggagaagaggtctttgggtaaaacaatttcccttttcctcggttacccccgaagtccccaggcccctgcacctagtctaggaagttagtaggtttgagccggaatcactggcgctgggagtgaatgaggtggagtctgtggcccaggccatctgggagggctgacccctggggctgtgtttgtccttccaggcaggtcccttatagggaggcctcatcctcagttcccaggcactagcaggccttgcatgacctggcttccacaccaacccgagtgccctggactggagctggagccactctgaggctcaagtcctccctgctgggaaggctggtatctggggcttgggacaggcacaccacaatctggacccactggagagctgggagcatgtaattctgtcccctggtctcaccagcccccacctctcctgccctttctcctcttctaacacccatccctgctccctcttcctcctttccaggagggtcaccagctttggggacgggtgacagggaggtgagtgggtgcttggggagagcccatctgtgctcctctctaggctcatgcgcggacatagagccaaagctgctgtggtcatggtgtggcctggcgtgcaggacacaatgcgggagatccctccctgcacgatggctgcccaggcccaagggagggccctccttgaagagctgtcagcaaggctgcccctgcttggggaggagtggccctgagaagcaggcctgctccttaccttttttttttttgagttggaatctcattctattgcccaggctggagtgtagtggtgtgatctccactcactgcagcctccgcctcacaagttcaagggattctcctccctcagcctcctgagtagctgggattataggcgtttgccaacccacccagctcttttttttttttttttttaattttagtggagatggggtttcaccatgttggccaggctggtctcgaaatcctgacctcaggtgatccgcctgccttggcctcccaaagtgctgggattcaggcgtgagccaccgcgccagccctccttacctcttttcatttgccctgaatagctctactagcattcaaggactcctcagcctaaggcaccagactttcatccagcctagtccacctccccaaagcccctccacgctggaccttccccttccctacatctctcctccctcctcccctcttccaggaagtcgttgttgacttactttagcctggaaccctgaagcagagccccctgagtgatgctgatgcattcatatattggccagtcctcttgttgtcccctggggggtgtggagagggcaggtttcagtagcacagaggatgccagggctggttggagctctatgtggccttgggcaggttgcttaacctctctgaattgcctgttgtcttatcatctgtaaaatgagggtgggtggggctgcccactttacaggttttgagggttgagttaggtgacacaggtgatgggtcttgctggaactaagtgatcaatggatgttagtttctctccccacctctccccttttccttttggggagctcccctgctctatgcgtgccatgactggaggccaactcaaggccagggatagtagatgtctgcacacagttgtgtgagtgagtgtgtctgtgtgtgtgtgtgttgggcagcaggctgcccccatccacctgctcacatgccacctggggcatgtttcccattagattctaacctcctgtgcttgtcagagcctaacctctgagagtctacctcctaagccagttcctggcctggtagggcagaaaggaaaggaagtcaaggagtggccatatctgagtggggctgaccggggaaggcggtctgcgagagtggcgggggcggggcggggggtgctgctgaattgtgcctggtggacttgctgggaggggatgagctccaggttctgacctcttggccatgtagcctcagggaaatgcaaactgaaaattttccctggtttcaagcaaaaaaaaaaaaaaaaaaaaaaaagatatagaattgtttctcgaagtcttccccactgagtttatgagccccgccagtagctcctgagcaagctctacaaaaatgttggcagcaagcagagaccaagaaaacattggtgtttcttaacttaaaccaaagttggaaaaaatgagcaccagcagagagagagaggagccccaaactagacatttctttatttgctgttgctattttgggtccagcaggctggccccgtctcggggaggacaggggagagagccgggggtggatgggggaagtgggggtcaggcattcctgccatctccctggggctggtggtttggagggtaaaggcagttaaccacccgggggagaggacagccgaagcgaacagccatggagaggtttccccggggcatgacacgtggactcaggggctcctacaggcttcattgaagatgaaccaaaagaaggggggctgtgtccgcaggagggaagcgtgaggtggccctagccttggcatgtcctctgccccttcctgagcctcctacctgccctgggctctccctccagggatccaggcctccctgaccagcgtgggaccccttacctcagctgccctttcatcttctgaacccacccgttttctcacttggctatactgctctgagctcatgacactaggcctgggtacttaatgtgttgcctcctctaggggacaatgtgaattttaagagcaggagcttctgctcctcaggccatgtctgacctttggtttcaatcaaatggtgaagtaattgtggagaataatttttgtttcatgttgggttgttgtggttattccatttggcagagcttctgaaagtttcaggaaaaaaagcagttgaagaccagtgaatagtggttgacatgctgataatcacttgaaagggtagggatattagatgatacagtaaccaaagaaataaaatactaaacatggagggggaggctttaatttcttctctttccagatctgtatcattgtatctcctttagagacaagttttagaactgtgctgtccaatatggtagccacagatggctatttaaatttacattaattaaaagtaaatgaaacgaaaactttatctccgcagtcatactggccacatttcaaatgctcggtagctacatgggcctagttgactaccatattggatggtgaagatataaaccattttcctcatagcagaaagttccattggcaagcactgttccagaagaaaatggaagcgaggctgtggtgggagaaggggagaggagaggtcctgggctagacatggttcttctctgcagagcgctcctaggagggaatgatgtagcctttgcctttgatggggaggaatcttggtgaggggtagggggtggggtggacgtttcttaattgcacactccccttctatgcaattctggtaagcgctcccacaggggacactcccagtgagggtgtcagcctgctctacccaggcttggaggactcctcctccccagcctctcactgggacatccggatcctgaaggggactgtgggtttctgtccttctctggtacccagtatccgatggagaaggtgcctggcgcccggatgccagtgcagatacgggtcaagctgtggtttgggctctcagtggatgagaaggagttcaaccagtttgctgaggggaagctgtctgtctttgctgaaaccgtgagtacctgccagcccccacctctgcctcccactacctggagctgccttggccccctgctcacgcctcattcttcctggccctccagtatgagaacgagactaagttggcccttgttgggaactggggcacaacgggcctcacctaccccaagttttctgacgtcacgggcaagatcaagctacccaaggacagcttccgcccctcggccggctggacctgggctggagattggttcgtgtgtccggagaagacgtgagtcgtgggcagggagggctggggagagccaggccaggctgcccaccatggactgcaccctccttttggaggcaggctggggtctgttgatccctctgcttgctcctgcgctggtcataggaacttccgctgaactctcccaggactgaggcttgccaggcagcagtcctttccagaagggcttggatggtcagacagtcctttattcttttcattaaaaaaatttttttttttttttgagacagagtctcactctgtttggaggctggagtgcagtagcatgatcgcagctcattgcagcctcaacctcctggcctcaggtgatcctcctgctcctgccttctgagtagctgggaccacaggcgtgcgccatcatgcctggctaatttttaaattttttgtagagacagggtctcactgtgttgcccaggctggtcttgaactcctgggctcaagtgattctccctccttgaactcccaaagtgctggggttacaggcttgagtcaccacgcctggccaggcctttattctctctcttttttttttttgagacggagtctcgctcggtcgcccaggctggagtgcagtggcgcgatctcggctcactgcaacctccacctcccgggttcacgccattctccggcctcagcctcctgagtagctgggactacagctgcctgccactacgcccagctaattttattttgtattttagtagagacgaggtttcaccatgttagccaggatggtctcgatctcctgacctggtgatccacccgcctcggcctcccaaagtgctgggattacaggcttgagccaccgcgcctggcccaggcctttattcttaagccttcgttctgtgtggtgcccactgggtgtggccccatcctcaaagacacccaggacaagcccatcacctcctctgcacgtgaacccttctcgtgtctgggctgctcacacatcccctgagtggtcctttctctgtcagtccctctcagatccacgtggtccttctccatgtctattgccgcctttgcctctctctcctctccttttcctgtttggttggcattcaactctgtggtgtttaacttttttttacttaaaaaaattgaagtataacatattatacagtcaagcactcaaatcttatgagcacaacttgataaaactttatatttttacaactatccatcaagcctcgactgcccatcctccttttgctgtcttcagttggcccccttttctctttatcttgggtgatgtgctcttttgtccccgattatctcggagtgtccctaggtctccttttcactgtctgccttggtctcttgcacccttccctccccaccccccatgtctctcattgttggttggggtgaggctgacatacgcaggggtgctctccaggaggtggtagatggatgggggcctctccagcagagcagcagagactctgaccagccctcctccacagtctgctccatgacatggacgccggtcacctgagcttcgtggaagaggtgtttgagaaccagacccggcttcccggaggccagtggatctacatgagtgacaactacaccgatgtggtaaagcaggcactcaggggcaggtggggtctagacatttggtctctggaggcacctggtgctcagggacaggtggggcatgtttctctttgccccctcttacctccggagacttcatgctttgatttccaaagggaaagtgtggggtgcagtggtggcaggacactgactctggggctctgcccttctgtctgggacttggaggacgtatgttgtcaagttgcatcttttctgcctccctgctcacatctgtctgtctcctctcattgcttgcctgttcggttttgtccttagaacggggagaaggtgcttcccaaggatgacattgagtgcccactgggctggaagtgggaagatgaggaatggtccacagacctcaaccgggctgtcgatgagcaaggtgggcagcatgtggaacctggcgagccccatccccggcaagctctcaagccatgctggtggggacgactgaatgccagggcccttcactgggctatttcacccagggacgcttcttgaaggcaccccccactccaagctgcaaattaggaccgagagtcagtggccgctcaagagtctgtgaccatgccccaaattcagagatggtcccaggagagatggggggaactgccaagcaatgagtgaccggttccccctcccccaggctgggagtatagcatcaccatccccccggagcggaagccgaagcactgggtccctgctgagaagatgtactacacacaccgacggcggcgctgggtgcgcctgcgcaggagggatctcagccaaatggaagcactgaaaagggtgagccagcaggtggtgggtgggagtgaggcctgtggtcacaggtggccagtaggcacagatgcagacctgcatgcccacagacacatgcatgtgtgcacacagcatgcacagacacctgggactcactggaggtgctcacagatcacacccagcatacccaaagatcacacccagcatacacacagatcacacccagcatacccaaagatcacacccagcatacacacagatcacacccagcacacagatcacactgggaacacccacagatcacactcagcacacacacagattacacccagcacacacacagatcacacccagcacacagattacacccagcacacacacagatcacacccagcacacagatcacacccacagatcacacccagcgcatgcacagatcacacccagcacacccaaagatcacacccagcacacacacacagatcacacccaacacacccacagttcacactcagcacacacagatcacacccaacacacccacagttcacatgcagcacacccacagttcacacctagcacacacagattacacctagcacacccagcacacgcacagctcacacccagcacacccacagatcacacccagcacatgcacagatcacagtcagcacacacagatcacacccagcacacacagatcacagtcagcacacacagatcacacccagcacacacacagatcacacccagcacacacacatcacacccagcacgcacagatcacacccaccacacacagctcacacccagcacacacacatcacacccagcacacgcacagatcacacccaccacacacagatcacacccagcacacacagctcacacccagcacacacacagatcacacccagcacatgcagagatcacacacagatcacacccagcacacccacagatcacacccagcacatgcacagatcacagtcagcacacacagatcacacccagcacacacacagatcacagtcagcacacacagatcacacccagcacacacacagatcacacccagcacacacagctcacacccagcacacacacatcacacccagcacatgcacagatcacacccaccacacacagatcacacccagcacacacagctcacacccagcacacacacagatcacacccagcacatgcacagatcacacacagatcacacccagcacacccacagatcacaccgagcatggatcacatccagcacacccagcacagatcacactcagcacacacacattacacctagcacacccacagatcacacccagcacacacacagatcacacccagcacacccacagatcatacccagcacacccacagatcatacccagcacagatcacacccagcacacccacagatcacacccagcatggatcacacccagcacacccagcacagattacatccagcacacccagcacagatcacacccagcacatgcacagatcacacctagcacacccacagatcacaaccagcacagatcacacctagcacacccacagatcacacccagcacacagaaatcacacccagcacacccacagatcacacccagcacagatcacacccagcacacccacagatgcttatagacagacacactcagatgcccatgattacagaaggtcacatgcaaagttcacacaccaacctggaagatggaaagacacccatggactttgtcttaggctgggtttcctggaggcagaagctaagacgtagatttggctgcacattattggggcagtgccctcgggagtgtgaggagcaaggatgcagcttcaggcaggtcagctgtggcctgagctgtggcctggggaagttcacaactcggaacaccacagaatcctcacctggaggcagggctgggctttgtatcctctcagccatctgtctaggcttggggttgctggggtgagctggggcacatacctatctcttcagtgagggggtttcctttagcatgggggttccctggagcaggtggcttctgggagctgggagctgtcgatgctgatggcagctggggatgggtgcgccacacgtgtacattggctggtgagggggctggggtgggccccgttggcattcatgcaatgcaagcacacatgcccacagttgagcacagatgccatgggatactgtcaggcccatcgtgcacatggatgagcacacgcaagcacatgcacttgctccggggtcacacaggggcctgtgcactgcacagcctctgtgcccgcctgtcctggaccttcttggtctatgatcttccttcctaaacacacatttgaattttggctcaagaaccagacctcccttagtccaggagtagcctgtggcatgacctaggttccttcctttctccttgggggcagagaacctagagaggactcttgctggctccagggaggggcaaggcttttggacaaccagctgttcctggtgctgtgaaccagacagattcaactttctccctgaaggggcacccagcagacagaggcaaagcctgcccaggctcatgtgccttgcccaccaccccacagccagcatccttcctggagagtggcacagctggcctccaggactggcccttgtcactgtgctcctggcccagacctgaggtggtgtctgacaacagtgccaggtcaccctctcccaggagctgaatggcaagggggctcccgggactcccttcaggcccaggaaagggaccccatgaacgaggtacaggggtgcctccatagctgagttgggtctagctcccaggggtgaaattggctgtggttgggaaataggatcttccttttacctctgagctgcagacccactacaggatgtgaagatgaaaaaggaaatgacaagaaaactttggattcatgaaatccacccagaattcaaacaaataagcaagttaaaagcccagtgttttcgtcactgcgtcagcctaccttcctttctggctgtttggttcttcccgcagcccatggagcctcctctcccctcctgatttttctttttcttttttctttttttcttttccttttgagatggagtctcattctgtcacccaggcttgagtgcagtggcgcaatctcggctcactgcaacctccacctcccaggttcaagcaattctcctgcctcagcctccctggtagctgggattacagacatgagccaccatgcctggcctcccctcctgattttctgacctggggttcctgtggctgcagaaagcccctctcctctaggtggccctcccaggttttcccacctggagggcactagtgtgggagctggtggggagttgtcatggaagacaggaaggcaaaggtggagccgagcacagaactccccccagccttcccaccggcctctgagtctgccccttctcttgtgcagcacaggcaggcggaggcggagggcgagggctgggagtacgcctctctttttggctggaagttccacctcgagtaccgcaagacagatgccttccgccgccgccgctggcgccgtcgcatggagccactggagaagacggggcctgcagctgtgtttgcccttgagggggccctggtatgtggggctgcacttgtcctggcttgggtagggtatatcttggtttcccagggctgttcgggctgatgtgggagaggcacagggaccccaggttaggacttttggatggaacgctggctggtcatcctggcgtcagtacctgtggggtggcatgtggggaaagcagccccagtctgggtgttcttctaaaatgaaaaagctccttccttggcactgaaacacttgctgctactactttgaggtgtcaagatgaaagcagaggggaagatggccttggccgtctggctggcctgtgcctggctggctggtgtgaagatgggcgaggaggcccatgggaggagtgagagagttcttgtggccccagagtgtccttggttgcatgtgcatcctcttgaggcagagaccatctcatggtcatccccagcaattttggggaagaggtgtgccttagaagctgagccccaggatgactttcctgcccagggtgcgctttctgtagccagtggaactggggtaggctcaaggttctccagggccggggtgacgggctccccaaaagagacgagcaggtgtctcggggacagtctgagcgagcactcggtactggcacacagccagtccccactctgctgctctggggaaggagctgctccctctgaaatccagccaggactggcacctccctaggggtttgggctggggccctagggagcaagccccatgggacgtgagggtgtccatgtgaagccagctgtgtggttggggtcaggctgggcacctatctgtaggacagcctggctttgaaggctggaggagtgctgtggggtggctcaggatctgttgggctggccactggcagggaggtgaagccagcagtggccctgagagggagtgggtgggctggggaggctctgtcagtctcaggcctcgatggtgggcaaggcccaacagtggcagtataggagaggaagctctctgggggcctgaggacgtcagaggagcctgccataggcttcggagagagcccctcccttgccctggggccaggtcaaggggaggctgaggggagatagcagagctctcggctctctgggctatggactggtcttccggccagggtcgggcaggataggatggaattgctgcccaggtcagagcagctggggagccttctggggtggggctggtgttctgtggccccctctgctttgagtcagaaagggcctggcctgagcactgggcaggggctggtgatgatcctgcggctctagctgaggggtggggtataaagaccttggcaggcctcagagtcagggccaggtctgagaaggccaggaaagcaccctgtgtaatcaggatctgttttcatcagccagagctctactcaaaggggctgagaagaaaagtggtttgtgggctcacagagctgggaagaacccgagaggtgaagcaggcattaggcctggcaggaaacaggttcatacagtgtccccaggactcgcacccctgtcttggccttgtctcacacgggctctctctgtgtggtagcaaagatgctgctggtgacgaaaggccaacatcatccctccagccagcaaagtcctgctagataaagtagcccagcccacagcgccacactctgttttccatgcagctggagacccctgagtgctgccttctcagtaatgtcagtgaagtcttcggcatgactgaccagctcagcctggtggtgcccagccagcccctgcacctgggtgagggatggagcgttctgattggccggcatgggccatgccccttctctgtgattgacagtgccaccagattggggagaggagcttctgaaaacaaaaacaaaaaacaaaaaccaaagcaatgttgggcaaagagctccagatggtccagacggtgaccagagcagtagggagccagtatgagttgttgacaagaagagtgctctggtcagagctaggctttaggaccatcagtcaagcagccatggaggatgcttgggaggcagagcctcccatcaggaaaccccaggagtcttgtgtagagatccaggagaggtgaccacctggcgtgaggccgtggggctgaggtggagggaggtgggactgaagggtttggggagggaagggccagaggtggacagtggggaccctgtggttgccaggccgcagggcggggtggggcgggctgtgatgagttcacggttggccctggcaaggctgacacacacggtgaagtgctgtgtgagggagacagagctgacggctgcctgccaggcggcccagggcaggaaggctggagcggggagccgagggggccgggagtggggaagaggtgactggagacacgtggacaaagcgtggatggaccctggggctggctagggcctggaggaagaaagtgacaaggctgggggacccaggccaagctttcatggctcagcgcctgggagaatgagggggggcacttcccagaagcagagagaccgatctgcgtattcttcttgtggaagagactgtcctgagggatcactgaaactaggcgtgaagtcagcagccatgggcgggtgatggattgtaattcacctgtgacttgcctatgatacatggaagagaccaaagtggcaaagccccgagtcctgggacagcttggctggcagagagaaccagaaagggaggcggtggcttcagagggcagatcccacagacctgcagctggaggaccagagagttttggaaggtttaggtgtgtctggcatttggacggggccacaggcccacttgactgtctggaagactctatacctgagtgacacacactcacacactgtcttacacaccagcacacacaccaacacacactcatacacaccaacacacacactctttccactcatacacaacacactctgttacacgaacacacacaccaacacagtctctctccacacattcatacacaccaataagcacactaacgcacacatacacactcatacaacacccccacacactaacacccatacacactaacacctacacaatcacactctcacacataccctcacacacaccaacacactctctacacactcccatatataccaacacacacacacagccccactctcatgcagcccccccactctcacactaacacgtacacaatcacacacataccctcacacacaccaacacactcatacacaccaacacatagacacacacacattctgacatacactctcttacactcacacatacacaatcatatgcacacgcacccacacacactctttcacactcacactccccctccacagtcacgtttccgtcttcctgctgggacccagaatggtttgggctcccgctgctgagctgctgtctttgtcccgggatgtcctgatgccccagcacagcactggggctaaggtcctccctgcctcctggggaaggtggttggattttctgggtgctaggacccggcttctgtcctgagagctggtctttgcccacgggtccctgatgcctggtgattcattggtgggatgggtgaggcctctgtggcttgaattctgctttccctgcttactagctgtggacgggtcactcatgccattagcaactctgttacctcactcgtgcaagtaactgaatcccagggccattttaaggatgaatgacgatgcatgtagtgaagcacttctcagacttagcaaaagcaggcaccgtctggggatattgttaaaatgcagactctgattcagggtctggtgggccccgagaatctctgtgtctaacaagcctccacatgatgctgatgctgctggtccaggggccatctcggagtagcacagatgtgaagtacaaagtgcctcatcaagatggggctcccattggccccctacttgggtgcccttctgagagaggcagagcatgtgcattcctgctgggaggtgtgtggccagggtcctggagagggaggtatggcaagatgacatgttctccctgctgcttggtgggggaaatgtggtctttacttctaatgatcccctgatctgatggtggaggcctggctcatggggaactcctgtctgatcaagaagagagatgttcacatgtgagtgcaactaaacccctagaatctgcgtctttgaagtgttggaggtagaataagagtcattccagagtggcagtgtctaatgaggggaggcttcttgaagaaggatgttgggaggcaggccttgcaggggctggggaaagaccgtgggtggaagccaggtagccttgctggtaatctgacagttctggaccaggtctgtggtgcccccttgcctcctgccaccttttccctgacccaacacgtccaccagcgagctgggccttgcctgccagctcccctctggaagacgtcttgttggaaggcaggccctgtctgctcattagcacgggcagcctttccctgaaaccttctgcaggggccaagcctggctccttccacggagcgggaggccctggctccgtctgctaatcgtctgctgtctccatcccgagcattattttattttcgtattattctttttccagctaatatcctggcatttccaaagacaccgggtttcataatcttcctggcgttcccagggagctgggaagcagagcacaaagccgctattatagcgcgttccatccagcctccctctccaccccacaccccctgtggccacagcagccaccaccgccgcctcccacccagtcaccccctcctgacgccaccggcctctctgggaactctggtgacggctgccgggatgagctcacagaatccatcctgttgcccttgccctgggcctgccctccatgatcgaggatttttccaagccctgcctctgtgcttggcttgagtgttgggaaaggttctctgagatgcctgggcctggcagggaggggagggacagaaacgtcggcaacgtgtgctcagagtcttggagatttttgctgctggaagaaactttcattttctaaaggcgtgcctgatctgccttgggagctgtaggagcatcttgatattggatggaaagttgtgcatgtgtacgcacgcatgtatgatctggtgtaagggccatggttttatccaatgctccaggggatccaggaccccatagaggataagaattattaatattcactttaccacgtgctaaaaaccaggctttatatgcgtcatctcatagtgaccccagaaggctggattctattattagccccattttacagttggggagactgaggctctagagctgcactctcccacacagtagccactagccgtgggtggctacttaagtttacagttaaagtaatcagaataagaaaatttgattccccaatcagacaggccacatttccagtgctcagtagccacacctgccgagtggccagctaccacattgggcagtgcagccattgacggtttgatcattgcaggaaggtctgctggacagtgctgctctggaatgactccgagccctaatgtcaccttggaagaggcctgagtggggatgtccagcagcacagcacgagtcagtgcttaaccaaggtccaggcagtggctcttctgcccctctctccaggtgtcccctgaccagcagccaaaccccatctggcgctttcattcccccacttctatgagggcatcatgtctctcctgctccatggagtccctttgtggtggggtcccagggtgggaggattggatgctgctggctagaggcctctgccctgggcaggcttctcctcacctgatagccaggcagcttggcagtcctggggcagtcgggcagctagagaggagctggccccccggccccaaccctgggaaacctccagagggttggtggaggccagcatcccgactgcagtagagaggaccctcagagacaggcagctcaagcctgggccggcgaggcaaggccagttgggagtcagaagtgcagggatgtgggtcagggaaaggctggttccagagaggagtaatttgggtcttgagctggctgaaaaggaggtcagatgtggatggggagggaggggcggctctgcgcctgaaggaagccatgctgtgggcaggggacccaggcttggttcccagagctggcactgtgagcaagggcaggccctgggaggtgcgaggggtttacctcattaggaaacaagacctatggctggggctggggctggggtgttgaaaggcagctctgtggatctctggactctgtttcttgaatattcacgttgagcacctgttctatacctggcattgtgctagcatgggcggcttgagggctggatctcctctcaagcagaggcctcgctgctcttcctactgcccctcagtaggggacaatttgggtaactctaaatgcgtggaccctgcatctgtctcgctcaagatttgaaccccaaggtctggaggattcgattgcgtgtccatgtgcctcaggcaaaatgccagcgcccagattcatggctgcagaggagtgtgttacagttgggcacatgtgttgagtatcacccatgtgggtcattgtacatgcatgagggtcttcatctgtcattgctagagtgaccatataatttactgtccagtctggaacactattaataatcacactggaaaagcaggcgtaagtaggaccattccaggcaaactgggccatagagttgtcctaattaccaaggcaccctggcgtgggatgaaacctgctccagtgttctctgcaacatccgcatgtggagacatggaaaccctagagggacaagcacacacgcatacacgctcgcgccagcccacacgtggcatcgtggattctccaggtttcctgattccaccctcagctccccaggggccagccagtagttttgcaaggagtttagcagctgcttccaagccctggctccagctgtaaattaaatggggttgcactctcgcctgctattccacttaaggttgcaatcagccctgattagaaagggagtctgtgtgttcctgtgttccgttctgtcttttaaagggttcccctcctttggcctgggctcctggcctgtgtggggtttccctgcaagctgaggctggagcagccagggaaatgaagtgggccctgggttccccacagccctgacttggcattcaaccatctgtagctccagaactttgctcaggtgctttgagctctgatggggtagtaggagcctgggaagagccttgagagtgggcaggaggaccccaggttctgccagctaatttgctgtgtagccccagggaagaccttaacctctctgggccccagttttcttgcttatcaggtgggaatgctaaaaacacaacaaaaataataacctcttcttatggagcaggggtcagcaaactatgccccacaggccaaatctggccctctgcctgcttttgtaaataaggctttattggccggtggctcacacctgtaatcccagcactttgggaggccaaggcaggcagatcacctgaggtcaggagtttgagatcagcctggccaatatggtgaaaccccatctctgctaaaaatacaaaaattattcaggaggctgagacaggagaattgcttgaacctgggaggcagaggttgcggtgaactgtgatcgtgccattgcactccagcttgggagacagaaggagactccgtctcaaaaaaaaaaaaaaaaaaaaaaaaaaaggctttattggcacatagctggtactcattcacctatgtagtgcctgtggctgcttttttgttacaacagcagccgaacagttgcagcagagaccctatggcccacgaagtcaaaagtagttagcacttggccctttatagacaaggtctgtcaacctctgttctagggcatgtaccgtgggccagccattgccttctgccctgtccacatagtatctcatttaacccttccagcagttctaggagatagggtctgtcagcactcccattccattttacacttaagcaaactgaggtaaccgagaagccaagtagtaattgtttagctgtgtttcctcccatgaatattgtgaaaaattttatggataatggttgggttgtgcagggtttgtagtagtgtacactacatcatcatgttggcatttggatgtcccagcaaagcctatagtgaagagagtgaagatggtgaagacctggaagatcaccctagaactgtgctggtcaatgtttaacaaccaggtctccagaacaaaacaaaacaaaacaatccccagccctggtttgtagcatttgctgatttccatggtgtagctgttcctgccatgaccaatttcaagctagcaatgtggcaccactgaacacagagctgggaagagacgggcagtagcacactgatacataatatttccatcacagatacatgagatggaagcagcctcaggagcagagataacgggaaaaggtagtacaaaaattagaatgggccaggcgtggtggctcatgcctgtaatctcagcactttgggaggctgaggtgggaggattgcttgaacccagggaggttaaggctgcagtgagctgtgattgcgccactgcactccagcttgggtgacagagcaagactccatctcaaaaaaaaaaaaaaaaaaaaaaaaaagagaaattagaatgatttcaagtatttaccaccttgagtttttaaatatagtttctttagtggtaaatgtatatgatttaatttttactaatggctgtgtttaacaactggcttgcagaattcctgaaaatataatctgctctcgtgaaccacatgcgctcactccagcacctgctgctctgaggggccccctgaccccttttacataagagatgggggatggcccccaacagtagtgccccttccaacagccctgccacaggtgctcttcaggcccatcctgtgtaggagttgagtcctccccataaagtgaaggagggtagccagcctccagctggtccacacccatctgcttgactctgctggagcagggaaggtctctgtggcctccctggtggcccctgagatgtttcctttctggccactgtggggctttcccctgcctgctcagccccaggaagcctcactgcttagcctgtgacttgttgctgtgtccacccctgctctggcccttctgtcaccttactgtctccactttatagatcctgagccagaactctaggccctgtttagaccaaggcaccattgcaaacagagggtctgcagacagagggcacagacaccccgtggtgcagaaggaatctcagacatgctggtgggctcgatcttggtactgatctgatttaggtgggttgaggagtcccctttgtaggctgtgtttccccagaacctgactatctcctcctggctgtggtccttggatattagtccttggcagactcaggtgagtttggccattggctctggggacccctgggggagccctgtggctctgggaggcagagagttcctcatattcctatgctcaggctcctccagggagccgtggcttccagccgggcagcagcgggttggaggccacccagttccctggacaagcagcaagatcccttacacagctagcccaagatggagtgcgtggccacagaccgtgtggctgccagccccagcctgggagttgcggtggcatgagctatcaaggcaggaatgtgactgtgggaaacccaatgccctgggcctggccctggggctgggcaagagtgtgtgtgtgtgtgtgtgaatgggggtgaagggtgggtgggcagaaaccagggcatcagcctctcctgcagcttggctctgcacggggctcagagtgggagcagaggcaaagcggccctccctgtcctggccttgtccacctggccaagcctttcctctaggctccagtgtgctgctgccgctctcccagttccagcaccctccttcccctcctccaggaagccttcctgaaggggcttccaaaggcctaccccattccatcccaccccacagatggcctcatcctggggtgtaagtgagtccacattaatccctttttccatagtaacatcagacccgactctgagcttcctgaaggtaggaggtgctgtctgatgcaccttgcctgtcctttgccctgggaccttaggcctgggtgctgcacatgtggcttagggcgagggaattctggtgattgactgcatgtgataaatcttcattggacgcccactacatgctcgatgttggactgggtgcaggggataaaggagtgtgtatgtcttgcctgcatacatggagggtagatgcaggggagaagctgggagaggctgggtaggggctgctgctgaaggctgggcagccaaggaggtgcccatacctcagagatgatgcagctaaggaagagcctgagttagctcatttgagaagacattccaaatggagaggacgacatccctgcataaaggccctgtggcagaggaaaggttatgaattcaagaaatttacagaaggccagaggagaggagtgttatttaacaagagcctagagagatgaaagagttaaaccaggtacctgccaaggaccgtggggtatcatttcattcagttttcactactagttctctacagggcacagtttccccgaacctggccacaggggacattgggcaatgtctggagacatttctagtgatcgtaactcagtggagatgctactggtatctaacaggtagaggccagggacgctgctaaacatcctacgacgcacaggacagcctcatagcaaagaatattccaggcccaattgccaaggttgaagagccgtgcattttccacagtagccctgtgtgggtgcttgtgaggctatgcgtgttagaatgcaattttcaacaggtcgggcagggatggcctctctgggcaggtgccactggccccgtgagcagcagtagccatttcacaacttgaatgggcaatgcctggcacagagtaggtgtttcgtaaatgggtggcacatcagaggagagactgacgggagggagatgcttccccaaagttcccagattgggttttcaagaggccttgttacttgctttgagagaaattccccaagcttgagccacgctgatgtccacacctgaaaaccagaatgtacttcaaaatcaagaaggcatgacattggcggatccccaccgggccggcctgtgtcatctgccctcctcaaggccgacacagttgtctttccctgaggcaggtgcccattgttcgtgagttcactcacttgttcaccaatgatgtgttgagcacctgctgcctgtgaggtgctctgctgggtgatgggtgcacgctgggcacctggctgggctctcagtgggacaagcagatgggtgctcgcaatgtaaagtggtgagtgcagtggctggggaaattcagggcgaagtgggagtgcccaggaggggtacctaacacatccttgcagggtgaccttgatgataagactgcacagaaacgtcaggggacacatggggcaagggcctgggggcaagaaaggagacctcagagtgttgcagctggtgtgagcaggtagggggtgtaggggtttgggggtctgtgggtttggtagtgtcctgactgccagagactcaatttagaggccacagcaggccaggagggaggggtggccttccctctgctcccagggtctaatggggatgtatggagagcccagtctcccctgggagggccagtggaccagaggatataaggatgttggccaggcgtgtgggtggaagtttgcccggattgtgaatcagggtggtacaaagagggactgagcttagtggcttccctcagcctggctctggggggtgtgtctcccctggtgccccagtaatacttcttcctaaaaatccccatctgtctccctgaggtagagggagaaggtcagcacttgggtggcagatggggtgagggtgggcagcaggcccctggaccaggtgtggtgtggctgggcccctcctctggagccaggtcaggttttggaacccaggcagtatgaggggcattctcagtgggagcgttggttcctccccctgcaggacagtcacttgcagggccagggactcagtgaggtccacatggaaatcccaaggagggagatgctgcttctgattgcaggcaggaggccctgcccttggacagagacccagaacgtgctgccagaacctcagacagaggccttgggagtggtgctgacaggggcccagtgaggggggccatctagaggaggtgcctggtgagtggggatgagcactggcagccatccgcgagcagggaggtccctgcaggcgctgggagggagagaggaaggatggggccctggagccggaggcgcctccctccctatgctcaccctagccccctacctgcgggtggggcacatgtgtgtggccggactgaggtagacggaccacagagtccatcccacctgcctgcagctgagtccaccccctatcctccctactcccactgctcccaccccttaccggtgccccagcagctagaggtgctgagatgcaggcatcacgcactgttgcacctgcgggctggccaagccctatttccagcgtcctaaccagctttccttagtgtccctgcctcccaagtctaagaggcctgctgggcctccaggtttgctttgcgtttggtgttgcacaccctgcagccaggggggtgttctgtggtcattcagggctgggcttggtgctccctccagtgggttgccagcgctgcagggccaggccaaacgcctctcctggcaggggcccagggcttccatacctgttcacgagggaggatttcaggcctttgggtccgtgagagagagcgagagagggggaaagaaactccatgtacaaaccaccactgcctggaggcactgggagaggctcttgctggtttgcttgattcttactgaaatgtccacttttacaccttggaatcattttcaacaaatatgagtgatgtgaacaccactcccagcacatgacaaactttatagtttatgacacgccccctccccaagccctgtgccttccctcgtaaggtcattgatagctaacatttcttgagcatttactgtgaaccaggaagtgtgctaagaactacatcttctgtatcttctttaataatcaaagcaactctctaaaatagatactgtataattatcccaaatttataaagtgattgattcagagaagttaagccacttgcccaaagtcacacagccagtagtaaacagcagggccagaactggagcccgaggaatctggtttcagagcccatgttgaagttgtggccaaaggaagaggagagtccaggcatctccctgtcagaaatgaggatgtcctgtggtggaagtcagagcccacccagggatagcaggaccttggagagtcccctgggagaatagagggactcagcctttcccaagtgtgtgttttgcaggccctttgcagcaagggagcagaggaagacccagcctaccttaggatgcaattcctttttgacccagagtgaccagggcaggctttgcttaggtgtcctaagatgatctgaagacggggaggcctgggatggttgacggcacctctggctgtggaacagcataagcttgctatgggagtgagtgtgtctgggacagctttaaggagcgtggtttgcctgaagccaagggccgggtttgggggaagaaagccttggtgtcggatggggaaagatagggcgggtcactgggggtctgaatgggagaaggctggactggacctttcaggccaccgaaggattcaggccgaggagctgcatagtgaccgagggtgatgaagctggttttggcttggggatggctggccagaggtgggagaacaggtgtctagggaggcttcttggacaaggggctctgggactgagtcttgagggtgggcatggtttggagagcaggggcacagtagtggcagtggtgtcttgtgttggaggcactggggggctttgtagcttcagagcctggggagaggttgaaattcttgggaaatggttccagggtgaaggtcagggtggcccagcagaagaatcctgggaactggccactctgggtgggatgaatgggccgtctgaggaagaggccagggttttctttcaagggtgtgtacacgtttgtgagatgtgggactgaacaaggaagtggagtagagaccgttttattacttaaccccacccctctgaaatggagcaggcgacagtttgggtagtgggcaggagggagaggagagaggcacatggagaaatttgagtgagtgcagagggagcagacagcacggggtgtctagtaacggccaccgactctccccagtccctctgtaggctgtggcttgggcttctggccctgggctgaggaagtgcatcggagagctgggtgtctggcccagggaagtggtccagtcttggtgctccccaaagtggtttgtggctcagtggttggagcccagtgctaatgagggcgaggtggcagggctgaccatctagctttatacacagtaaacagacagcttggcttccgagcctgactgtccacccactcctgtccccacctctgtcctcagcctgagccttgctcaccctcagcagagtgggaactggtgagagatggtgggtgtgtggtgcagcttcctccagagcttgggacccagctcgatgttagcagggggtggcagagatggggacccagagatgctagcctggaacctccacatttcgattccactggacttgtccctagtgggcagatccccatttgattctcccctggagagccccttcgggtcattccttctaatctctttgcctggaacaactaaaaattccgttctgactcatctggtcttcactagagagggagaagaatttcctacagtcctttggtgctttgacattggagtctggtgattttttaggagaggttgagctccccagaatgaaattagaggctgagagttcagctttcggcagcggagagatctcctggccctggggatctaactctctgggctagtctccctgccacccccaggcctgggggcagaatctgccataaccagcttcgtgtctccagggcggcgtgatggatgacaagagtgaagattccatgtccgtctccaccttgagcttcggtgtgaacagacccacgatttcctgcatattcgactgtaagtgaggcttcgaggcctctatggggtgataagggtgtgtcaccttatgcttctgtttggatggagttatacgatcagatgtgtatgtggggctctggggagctgagtctctgtgctttttggtgggtcagtgctgtgtgtatgtgtgtgtgtgtgcgcgcgtgcgtgcacgtgtccgtgcctatctgtgtggtgtgtccacccactcaaatctgagatcaggcatttaaggccctgcgctctgtggctgtcccattgtctatttggcctcccctcctcccctcttcctctatctcttctccccagccctaggctggcccaaggacatgttaattagtcaggtgtccgctttcaagctgtggtctgttctcctgacctcgcacagtggcctgtgtggtttccctcattcagcccctctgtctgctgccctttctagggacagactccacctccccccgagccccagctcttaaccactccagccactcactctggcacctctgttttttcccttggtgaagatgggaaccgctaccatctacgctgctacatgtaccaggcccgggacctggctgcgatggacaaggactctttttctggtaggtgggagagaggcaggagagtcagagactgtgggctgagatctgggaatggagacatctggctttcgggcaacaaggggtgctgtttgctgggtgcatggagatgggtgctgtcaccagggtcctgtggcttcttggtcgtcaggtgcagcaaactcttgtccatggcctgctggtcttcttggtaggatcaggcttcgctgactgtcccctctttcctgaaagccccttggccttggctctagccgccagtctctggagggtccctgcagcctcctccctgacctgctcctccttgatgcttcattgccctataagcctgatgctccaagaagtcttgtctgtgtcctctctctgggcaccggggtcccccaacttctccaccttcactcacctcagttcatcctgtgcaaacctccatgtgaccttgctccccagctccccccacccagatccaggctgcctctgcatttcctgccatggccctggggttggcagccatctgttacccaggctggaaattctcagtcacccagtcctgaggattctacctcctgaatccctctcagatctgttccctcctctttaatgtcacactgccatctgacactggccttgcccctttgtatctaggtcattctggttatcttctgatctccctggcaccttccacactgccccagacacacctggtcacatccctcccctgatttcaagtatagacactgacagataacctccaactcagcacagcagacaagtcccttgtgatgtaaccctgtggtcctcacctggttcaccttttgctcattgccctctatccagtagctccagccccaccaactctgtccacgttgcccatgtctggcctttgcactcagtgcgctctctgtctagaacacatttgctccctatttctaaccagcaaactcctagttatccttcaagacccagcccagatgccctctgacttccccaagccaagctgtttgctccttccctcagcacttggccagtgccttaccagcacctccctcagaggccttcccctctgcacagatcaacagtggtctatctctgccatctccttcctgctctgaccatgagctcccccaggaaatggtctcgtcttactttgaacctgcagcacttgatggctaaagaacaaacacttgctgagtgctcactatgtgcccaggcgttttgctgacactatttcatgtaacccttacaattgccctgtgaagtaggtggtcaacatccccattttataggtgaagagacagatactcggataggttaactaaatgcttgcattaaaatagctaccaagtgacagagcttggaagggaacccaaggctatcactgtctgagtgcctgctgtttggttgagtagaactgagttccatgggagtgacttcctggtcacagcagggctctgcagctgatggccatctgccggcttccttgctggtccactctcctccgcgatgtggggtccagtctgtgtccttctctccagcagctgtggccctcagtggcccatcctccagctctgtgcagccaggtgcggggtggatgaggaagttctaccccgttttgctttggggccagggtcctgagagctccctctgcaagtgtatatagcagcaacccgccagaatttacaggcccaggccagacaggcatctgcagtggctaacttgtcctgggaaacttgtccaggagtctgacgattagaacttactctgagaaaaaggacatggacgagtttatagccttgcttcctctcccttcccggaagggcgtgagaggtgagggtgccgggagcgggtttgtgagagggggatggccagggggggcccaggcagaagcccccttgtcctctgtgggccctgcgggccgagcaccctgcagagaggggagggaactcctccaagggcccagcactgggagcctatgctcccctctggagacggcattggtagggcagtggcactggtctgcggagacgtcacactttccatcctggccccaccccctcccccaaataaacatcccttgagctttgagggcactgcccagggcttcctcagaggccactggcttctgaatgaaaggcccgattgagcagctgctggaaaggaaaacagcagccaacatgggtgaacctataaaacccagagtgtttattttcactcccaaaccctaaaccaaagcaatttctcccctggaactgaccctggggcggctggcggccggaggctgtgcatggccaccggctggcatttctctgaggaaactcatgtgtgaatccggaatgtctggggccaggggagggcctggcacagtgtctgtcactggtgcagcttccagctgcctgccgggtgtctggggcagagagggccctccttgaaccactctcccagtgcctctgacctgtggctctctgggcctttccccgggggctcctacagccctctgctgtgctctttgcttctctctatatggtgggtctcggggctgcccggacattggggccatggctgctccttctccctggtcgaatatttgaggagataggcaggggttgcccagaaaacacttgttgaataatattgaacttgggagagggaggctgtcctagagatattgccatccagacggcctgagggttgcaccttaggtggggtttgagtgtatggctgggatatcaattctctggaccagtggaagggcatctgtggtatgtgcttgtgtgtttattaatgtgtgtgccctgtgcagcaattagtcataaaaaacataaagtgatacttaattcagtgacttcttttttttttttttttttttttttgagacagagtttcgctcttgttgcctaggctggagtgcaatggcgctatcttggctcactgcaacctccgcctcccaggttcaagtgattctccagcctcagcctcccaagtagctaggattacaggcacccaccaccatgcccagctaattttttgtattagtagagatgagatttccccttgttggccaggctggtcttgaactcctgacctcaggcgattcacccgccttggcctcccggagtgctgggattacaggcgtgagccactgtgcccggccagttcaatgacttctttttgttgttggggtggggttcccactgctttgtgaacatctgttgtatgtactgggtttgctttgaaatgaaaggctatgacttgagaggacttagaacacgtcaccaacaccacacctagctccgtcctgcccacccctttggtgtggagtgggtagcattgcttccctgaacggtagcctgagctgagttactcttcattgtagattggtgtttctcacagggaaccagggaagaaggtgtcaatttggccccctctgccagctaagaactgctgttgtggttggagggatcataagctctgcttgtagagctgcccgcccagatggaggaccctcaggcagctctatcatgaggtcaccacgttccattccaagggatgaccctcagcttaggaggggcccagaaatccctctttgaggccctcccaggtcactgggctcaggcggtccaacttggctaactgagccaatgagagatggctgatagaccagatgccacgtcatttattaatttacaggggtgagtacctctcaagaaagtagaaggtcctgtgccctctttgctggccttacagctccaggtaaggtcacagtggtgggccaggtaggtgatcctatgggatggtcctgccagaccaggctgcagtgaggtttgatgagccggagctgcccacagctggggccacgtcttgatgaccggtgccttagtttccctcagattcagactcagtcctgggtggtgctggggatttcttgcttttgggtttcccaagtctgaactccagtcttccttcccaacccctttttaagcacagctttttgttaaggttggctctggctggggcaatccaccagacgagcttaaggaggtgttttccaaagtgcattggaggcttgtgaaatgctccacttaaaaagggttcctgagtaagagagactgggaaacactgcacgcttcgggatttacaatgcacagtggcatatgagaggctctgaggcggctgcagggagggagcctgtttaatctgtttaagcactcattagctccccagaaaacccaccactcaaagaacacattttgggaaacactgatctacaggattccgtccaaattgctcagcaggaatccaggaccatttgtgatctgcccctcctcccctcctgcctccactgtccccactgccctggtgctcccttcatcccctcagccagaccaatggcttgctgatccccaagtgcctaaagtctttggtgtgtttacccttgccatgcttgcgcctggaatgcccccttttccttggtctgcacggcctacctcctcatccttgaggcctgctttgggaagcctgacttggtgccagcaggcgacatcaggtgctcctcacccctgcccctgtatactccactattaagtagcacatcaccttgtattatacctgtttaggttacaatttccaaccagtagtcacactcttaagagcctggattatgtctcattcatcttcctattcctagcactgtgctaacctcccacaggatagccaatcaataattgtatagtgaatgatgcatacaaataacgcaagagtgaacgtctttgtacatacatctagctttttggtgaatctggatgactcccaggaatatgggaaaagggtataaatggttttatgtttttcagggcatagtgcccaattgcttttctgaagggttgctgaattgcttccagcaataaaggagagtacctatttcatcaactctttgcccatactggctttttataattttgaacaatttttcttaattttataggaaaaatattgctggagtctagttttaatttgcgttgccttgattattggcaggcgatcccaccctctctgaagggccctttcctatgaggtggcatggtggaaggagcactggactaggagtcagggggtctagtacatacgatcatggccgagcgacttggtcttcctggggaaagctcccttttaggaaaactggggtgatacttcccactctgtccccgaccctggtggtctgagtggttggtgggaaggccgaggaggaaagcttagtgtattgtgaacgcagaaggtcctccccggagctccaggaaggttggagcagcagggctcagcccgaacagcctggtgcagggctctggatccagctaaggaatcgtctgcctgaggcctggtgataggtccctgactcccttgtggtgatgcagtgaggtagaatccttgtgtgctcatggctggatcctccctggggcagccgtggtcctcagagctgcaatccaaagtgcttgcctcagctagggcacgatgtgcgctgcatatggcttgtgggtgtggccctggggagagccctatgctgtgatgcacacgcaaaacccagcccctcaccttcccctccaccgctttttgggaatctgcctctccctcctcttagctttcctggaagagggatttgtctgtgagtgtgtctggctgtccttcatctgaccaccttgctctagcaacacccctactcccctttttcctttttttttttttttttgaggagtggggtcccgtgcagggagaggccaggcccctgcacacagtagcccagtgtctgaggccccaggcctccaggcctgctctttacaatgcctttgttgtgtgttttttcctcccatgggcgggtggggcacgtgtgtaggtctgggtgatttttgtttgaaagccaccccctccccgttctccccccagcgctgagctcattgcctgggctgatggggctgctggaaggagtcagcctgctcgggggccagcgtggggggtgctgccaacaccaatacagcgtgcacagccgctacaatgtgcaattgtgatctttgtgtaaacgcggtcggtctggggcccgcatgcttataaaaataaagcgtagggaagcacggggcggggcgggaacaaaaggggctttttcgctggctctctaatatggttttatttatcggaatgcgccctcctttccttactggaacctggagaggttctctgccgagcttggagctgatggtatcacagccagacggtttcattaaatgcacagatgcctctgggccctgccaggggcaggacggaaagggctcagggccggccctgccaggtccagtgcatggaaaggagagccccatgccagagaggctcccaccaggtaggggtgggcagttctctctggctccttcccctgccaagggcctcccattgccctcttctgttccacagaatcaggctcaaaaccattttcctgcaggaagtcctccatgatttgtgcctgatggctgtcaggctgatcccaggctggtggctgccttctattaaccagacccagcattgctcagccagtgggtggccatggctgagtccgccccttaacttagatacctcctgctcttaaaatcagctctttgggcaacaggtacaaccttggatcctgctctctccatcccttgatgggtttcctgccattgcccaccccaaccttcccacctctttcctggtcactccttgccagcccctttctctgccacctgtgcagtggccatggtgtcccatttggtcttcttgtggccagggagcctgtcttgctcttctcccctttgtgcggaagccctgtctccccatcccagcccctgggttgtgtttgaacctgcatccttctgaggccagcgacacagaggccattacctctgaggccactgaggccctcttgaggtcacaaggggagtgaatggcagtgctagggctggactgtggggctcagagggcacaggccattgcaggatggagtagggtgccaagggtattgagtgcatggttaggcactgggttcagccctcaaggtgacatcccattaggagaagctgaagggagtccccttctccaagccctgtgttcctctcccaagttatatgcactcagaccctctcctgcattggtttccaaaatgtggtcccagaaggcagcatgagcatcacttttaggaacttgttagaaatgcacattctccagcccaccccggccctgctgaatccgagtctctgggggcagcacccagcagcctgaatgaaccttccagatgatcctgcagcatgctcacattttcagaaccactgccctagagtctgctctagtgacaccaacttgcctttgggacaaggtagagggaatgagttgtggctgggtcccagggtggcgtggccaaggctggcaggctggaaaggagtttgggggtagcagggagctgcaggggcctttgggtttctcgcacacccctactgctaaatagctgctgagtctgtgcacttccctttagcaccccacacccatctaagccaccattattcctccctggaccactgcagtgacctcagaactggtctccctagacctcatgctccctccagtctgttctccatgtggcagccagagtgagcttgctgaaacgcagacctagccacgtcagtctggtggcatcccagagctcacagacaccagcagctctgctctgcttccccttcctcaaggaagccagatccctccctaacacatttcactgcattttatgtctattcttcaaggctctgacccaaattgtaattttacgttagcttgtgtggatattttatatttagttcaaattgtattctcagcccctagcacctagcacctagcctggcataaagaaggcactcaatacatgcttgctggatgaatgaatgaatagatgaatataccatacaggcactcacttcccccagctggaccctgcttccagcagccacagctcaggaagcggcagaaaaggggatgctctctggatcttgtgcccatttgccaggacccaggctccatgtccccaccgtggcctccagctggcctcatggtggggctaggagagccccatagggaagatgcatcccagcatgaatgttgttgctccagagtggcagccacaaccctgctccagctttgtggccccacatggctctggagaagacatctctcagggtccctgctgtgtcctgtctcccctccccctctccggcccatgcagatccctatgccatcgtctccttcctgcaccagagccagaagacggtggtggtgaagaacacccttaaccccacctgggaccagacgctcatcttctacgagatcgagatctttggcgagccggccacagttgctgagcaaccgcccagcattgtggtggagctgtacgaccatgacacttatgtgagtctgcccagctcctgcctcgtcccctcacagggagggaccatgtgcaaaggtggggtctccagggactcgtggctgcccagccagatgggtgctctcctaactccacgggccctagaacaattaaaataattttagagtcattaaaaatggattgctagcacagatgccgttcccacagcagacattgctcatcagtggaagggaacatatccggaaaaggcgcttggttgtgggtcaggggcttgggttttctctgcctctgcctcgcctgtgtgatcccaggccagtcccttcttctcatcgaggagctgcgtggaatccttaaatgtacatcaaacacttacgttactggctgagtggcccttcacttggggttccttgtttaggtgggagcccagacacccacacagtggagaatcctccatgtgagagcacgggtccccgagtgcctctcaactctgtgccacaggcagggcctcttaccacaactgtcccacaggacctcctgtggtgacaggcgagctctagggctgtgctgtccaaaaagggagcctctagctgcacgaggctgcccagcactggaaatgggactggtgcagctgagaaatgaaattgtaaattttatttcattttaacgaagtaaaattaaaatttaaatagctgcaggtggctggtgctcctgtattggacagagcagctctaggaggctcccaggagggagagagtgctatgggctggaatgtcaggaaagcctttgggaaagacccaggccctggaggaaatgtggggttggggtgtcagtgcgaggcagaggcctggaaggaggagaagggagtatgaggccaggggagcaggagagtgctgacgtcagggcagcattttccgaagaggaggctggatgctgccggaagagatccactgggcgcaaggtaaagaggcccggcctgcgctggaggtggcggtgggatgaaaggggaggggctgggtttggaagacattgtcagtaagagttgccctgaccagacatcaggttccctgggtgggtgtggtgaacaggggtgggggaaggtgctgctgtctatatgcctcaccagatggcaggggcagctggccatgggtaagctggcctgggctggggatgcaacgttggggtgcttggaaggaaaagctggtaccatgggaaggaatgagcaactggaggaagagtccatgtgggactgtttggagaagggcacaggccctggcaccttcggagcaggagggaggcaggcggcagggctggcacttctcggggggactcggcaggactgagtgcaagtgcagaacagggcgggagggcagcggtatgagctgcaggctgccagagccctgagggggcttgcccctgcatccagtgtgacagatctgtcttctgggcggcagggagttaaggaaagtgcctgaagaaaaggcacctgccttgatgaaaacatcattttgtccaggctcatttaatttgatgaacgtgatcacagtttccccatttgcaaagtgggtgggaatttaagggtgaaatgagcaggagatacagaagtccctggaactgcaaaaacctgtactgctgagcgcattagagaaatgccaggaggccgtctctctggtctccaatagtcttagcgctgattaaattgtagcagggcaaacactagttggacagtgttgaactgtccagagggacttcccgaccatgatgggaattcaaacctagtgacagtcaccacaggctgctcacagcttgttttgtccttgagtcctgctaaggagagcagaattcaccattctgtgggagggggtgcccttactactgaggccctttctagttcagaaggcacatgtagacctgatctctctgaggctccctagagccctgggtaagggatgctgattcttgtctctctacgcttggtctagggtgcagacgagtttatgggtcgctgcatctgtcaaccgagtctggaacggatgccacggctggcctggttcccactgacgaggggcagccagccgtcgggggagctgctggcctcttttgagctcatccagagagagaaggtgaggctggtctatatccagatccaggaggcccaggcaggagtggggtgggggccaaccctctgtgggagcctggaacacctcctctgaagccaggcctcctgctgagacccattttctgaaccctaagtcaggacaccatctaacatcggaatagaatttggggatcaggaatgtctgagtcctctggtcactggatttaatcttccttgggtcatctcctgacgtggtttctgggaggaggacctctgtggtctgattaagggagccttaattgccacaatgtgagggactccagggacaggcaagggcaggatccccgttgcattgctggcttcaccatgacctagcctcatggccctgggccagccactcccctgctgtaaaatgagaggtttgggttggacctgtaccttcaaacttcctcttagtatgatgtgaacccgaataagtagactgaataggagtagggctgctctgggtgaagtgtctggaggaatgggcacagtgccagcctagcatcccttctaccctcaaggaatagaggctgcaaaccatggactgtctgatcactgacatagtccatgagtgtcatgagggtgatgggggccttaggtgacaagcacatgaccagagctctcttttcttcactccagccggccatccaccatattcctggttttgaggtaagtcttgctctgacctttccttcttcaaactgattgccagtctccctgtgtttggcatctctctgggttaggaagggtggccaggcattaccgcgatcctgcctcaagcccccggggaagctctttcaagcagaggagggcccgggctggagggagctcaaagtctctgccaagctcaggcctttgctgcccttctctgcgaagtccaagaaccacagaatcccagatggaaggatcctcataattgtccagcccagtggctttcagctggctgagcattagaatctccgggacagcactgcccagggaatcttaatgcacatccaggactgagaatcactgacttagccccagggttctgaaagtgtggcccattcttgagtcctacttcaagcccactgaagcaattctgagggcagcccagcaacctctgtatcaacttgccctccagggccttctcacacatgcacgagtttcagaagccctgattcagaccacatttcccactgaattgttcttaccaagacctcattttctttcctcttcctggacgggggcttcattcccttactgctgctctccttccttcttctggaggtcttggtagaaaatgttgagctttgactggtacccaggtgcactggatgcattacctgattacatgccaagttcagctgcatctatgagaagtagtcatctgggctgtgtttggacacctccattgtccttcacaaggcagcccacacaatttttagagagttcttgggaggccctcccttcatgcaagccctccttcaccagccctgcccctccagctctccctccctgtcctaagctcctgctctcagtgctgcccgctcctgggggttctaggttggttctcctcagcttgccaaggccacaggctcccaagcccttcccatcacctgctgctcttctctttccttttgttgcttccagagattcctggcgtccaggcttatgctttagcctttcccagcgtccctctgcactgacatccatcacaccttctttcccagggaccactttaggggcgtggctgggaagtgcatcattcttacccttggtgggaggtggtttctgttggctcctcttagtggtggcatctggcatgctgacctctggccccgcctagtgcgccttgatactaatagagaactttttccccttccaacccctctcaccatctcctggatgtgccacatcccatggctgtgggccaggtgcaggagacatcaaggatcctggatgaggtgagctgggcgtggtggttgggatgggtgggccgaggtagagggaaggtgaagccagccttcaagcacacacctggagccttccaggttcctggtgcccagcaggcatctgtcacatggagacctgtctggattttattccccatgctgtgtgtggattcagggctgcccagagtgtgtcctgggggtgatcctggtctaagaaggcttgctgtcctgctaggaggccagatttcacccagacaacatgaatagcaatacagattcttaaatgattaagtaccaggtggcacattttgaagaataaattgtttggaaggggccagagtagtcaaggaagcctttctggtggaggtggcattagtcaaatgtctttatgcccatcagcacttaggaagaaagtgagaaacatggctttggctcaaaaggccaaggaccagtttgggtcctggctggtttgggggatggggcgagctggggacctcctagggacgggaagaagtttagagtttgcatttagataaagcaaggctgcatcctttgccatgggaggagagatgcacgttccctatggcctcctgtgcatctgtgggtggattgtcgtgagccaggccagagggtgggtggcagagacctgggtggagagacaggaaggagagccctggtcagatgaggcgttgggaaaagggcagccacttcctgccattagggaatccccagaccgacagcggacactatttgacattttcagtgtaatttggacttgaagtgcagagtcaggatgtgggatccacaggccccgcaccccttacctcacttccttttgctcccagaccgaggtggggtccgccaagtgagctcgctgtaattgcgcctgacaggcggcctcctgcttctggctgcagttgcaaaagactgccgatttggaaagggaggtggagtcctgtccagggaagcagcacggagccctctctgttgattgagtgcactttgtggccaaaacccacagcctgctctgaagaagacccagcccagggatgagttattaaaaaaaaagttaaaatccttaataactggattcgtaatatgtaacagtgaaggctcagattccgagggcagggatctggctgcagtctcgtcagaaagcaaatcaaaactgcagctcatgggccagagcccgaagagcaccgagtgccccctgcagggccaagcaggctgcaggctgagggtgggtgtgggtcagcagggccaggggagagcaagtcctaggagtgtgctaggcacagggctgggccaggccagcaggttcaaagggtccaaggaggacctatcccagtgggatgaatgatctgctggtccagggaccagccccagaagatgaccttgtgacctccctcagtcccaggggatagccctgggacccctagctcagcccatgtccttctcacttgaaggctaagcctgatgccaagatgctgagtcctcttcgctttaagaagccccagggctgggtggtccttctgttgccactggtcctcctgtaagtaggaccgcagcagggtgtttctgtcttctttgctgtgaccaagctcctgccttgtatctcccatctggctgctcccaggctcctggcccgatccctgtgaagagtgctcaagcctttctggagggctgggagcctcctcctgagcccctggccatgggagcccatgagagtcagggggcagtgagggaagatgggtgtgttggggagctgtctggctgcaggaggtgtgggtttgagagactagctaggaggctcttgagccagttgagataggggcctggactggagacaggccagtaggaacggatggggcaagtgactctgaaggatggtttaaggatatcctctcttgtgggaagtgcctttcagctagcgcagccaggtgcagagatttccaagccacagtgcctgtgaatgagatgaaatactgtctgcccttgtcgaaggctcccagagcaggacagtgagggtaacttcctggaagaggtgccactgagctagcttttgaagttgggattggtagaaaatgtggggaggtggcccaggcagcagtgtcttgggctgggggcatgtcacctcctggatgtggcctgttggacaacaaacttcccctctcccaggctttatgcccatctgggacacctctctctgcagctcttggtcaggaagtgaggctgttgcatggtgtgtctgaggctttgatgatgtccgggagatctgggtcctcgcagacagagcagatggagggaagggtttccttttcgctctccggtctgcattttctttgtctttccctctcttcctgagtctcttcccactctcctttcgtgtttcactcttcctgtttgctccttggccccagcttcctccttctccccgcctcttctgagccctctgtctggtttcttttcctttttgtctggagaacaaaggcagtccttgctgccaaggggaatgagttcaaagaaactgcaattttagatttcctgagaactggagaatgtgtgcatgcacgtgtgagcatgtgcgagtgtgtacactctcgagggcacacacatgcacgcacacacagcagctgaggtgatcgtgggtccctgaatgcccagggccccctaggatacagaacatgtgtagaagaagacccatggggcttgtgatcctgaccatttcggggaggtggggaggggagggggtgtggtttagagaattacccttgcttctgctgctgctctcctgctggggcaggggatgccctggtgggagggatcgtatgctttgtggctgattttactgccagttcaggggtgggggccaccagataccactccatccacccatccaggctgcagggtatatggcttttactctaagatgtacccggggtactctcctgtacccccaagtccactggaaggaaaaatttggtgttttgcaatcaggaaaataaagccagtggtcccccatcccccattcctcccccaaggccttaatttaaaacactgtttttcctgggaagtgtaattagagcaacatattgttcctaacgagctgggtggggcaggcagacaatggagccctcccagcctgcctggctgccccctgcctggagctccccgaggaaccaggatgtgactgcagcgtcttctgtcctctgctgggtgaggtgagggtccataggctactgatgacccggctgatgcaggaggcttgccaacacttcccttgccctgggagcgactcctgtctaacatggtggcccctagactgggctgggggtgcccctttcatggctcagggccttggttcttcgtggtaaactggccagcgggactgatagactgaagtgggcttgaggatggcttcagctctggtaggggagagagcttcacttgttcttggggtcttcttggtctgggctggcttgatcaacactctgcacacctgtagaacccatctctgcagccgcccctggtctgccctgcatttgaagggagcaagacgggagctggtcaaatgtggcttcctctgattaggcttatcagagtcctccatcaaccctaggacagtgaatcaggatgttctggtggcactttcagtctacaccccatctgcccagcagtgctgagaggcttcccagttgcagtgagggtcgcagcaccctcactgagaattactgtcctggagagggggtgctgtgcccctcaagtgggctggaccagaaaaaaagttgaaaaccaggctcaagagctggcagagacctcaggactcctgcctgggagatgatcagagatcccttaggaccataggaatggggtatgtggggaaagggtcatgtagacggggttaagagagtcagagtcaggttataagacgtttctggagcgtcttggggagattttctagagaccttgaattaggccctaaaaatgggttagattcagttggcagtaaagaaagcccattgaaccagagggagtaatgagcaggcctggggaggacccagggtcaggctagagcaggcacgggtgctaggaaggaggacagtgcgtgttggattcattcctttatcctcccatccacccactcttctgtcttcaccctccctcttccccttcagttatccattcataatcatttatttgttggacgggggaattcagctatggtccctgtgtacagaattgctggtttaaccaaggacacaatcaaatgaacacgtggagatagcatgggtgatggattgatgtgtctttctatgggaataagtgtaagttgctatgggagctacgggggtacttaagcttggggcaccaggaaagatttaaatggacacctgctgtctgaataggaagtacaggaggagtaggggtagaagtgcatttcagacagagggaccactgagctccaagcctcaaagctaaaagagcatggtgcctcctgcaacctgctagcattcagaagggcaggggttgcgtgtgtcccaggaggtggttcatcactacttggggtcatcaaggggaaatttatctcatgagagacatgcccagagaaggcagcaggagctggaagattagaggtcttgtggaggctactttgaagagtctgcacttcatcctgagcagatgggaagacattggaggacttgaaacaaagagtgacattattagaaagcctgccttggctgcagattgtagaacgcgtgggctgttgggagagggtgtcaaaaccaagtgaaagggggatgctggtgaatccaggcaagagagggtagtggcttgcactgagcaaaggagatgggtgggcgggcgtgagagatgttcaggagacaggattaccagtgtttggtgatcagtcaggcagggcgatgaggggcaggaggagccaagggtggcgtgggagcttttggcttggttgtctagatggtggggtcagacttgaagagagcaggttctgagggggaagatgaagaatccagttttggacaagttcagtgtgagaggccagtaggacacattaatgaactaagcagtaagatattggggcttagcagagatgtttgggagcagaaagtctaggagagggctaaggagcagatcagggcttggtggaggaagatgggaaggctgcagaggaggctcagcaaacagggtgagggccagcagtgtggatccagagagactgtttgggaaggagatgaggttagctggccagatgctgctgagggggtgagagagagaagagcccacgagtgtccttcgggtaggggactctggagacaaatttccggggaggggtgctgagggcagaagcagggtgcactgggaagcaggtggtgtggacatgagggaggagaggtagtggatggagacaggattagagagaggagaggagggagcctgcagagaggagggcgcgggtggatttgggagatggggatgtctttaaattgggaaggagcagatccaggagatagtgtgaaaaattggggaggagcatttggacgcatggtcagagggggagccacagaggcaggcaaccctgggaggtggcaggaaatggcagggaagaagcatgtcctgggacccctggggacagcacggtggacagagatggccttgggatgcatgctgtggcctcatgctgaggaagctgcctggacacacctctaaccactgtctctgcctgtctcttccttctgcctccgctgggcccgacgctccgcagctgtgtgctcctgccttcttcctccagggccttctccaaacggtattggagcttaaccttctccaggttcttgttcccctgtcctcagcaagcaggctcctgaagatgcggagcctggtccccagcctttagagaggaatgtcatcaccacggagctcgagggagccccgagggacagaccgaggaaatgagggataaagtggatactgcccagcgtttgggggcctagagaggaaatattctgggaggaatgtattcatgagttttccttagtgattttaagagaacaagtgtatgagaaagattggtctttctgccactccactcaggggatcctggggctgttccctccctgatggtttttttttttggcccctctttgtcttgggtttttggctctgggtccatattgggttgggcatagccataaggggccatgaacagaccacaagcaggcattcaagtgcaaccctgtctttaaagaggacaccctgctgtgctgccacctgcagctggtggccttggagtgcccagggaggacatcaaactgggggtccccatagcagccaggtcactgcagaagctgtgtaggccctgcctccatcctccaagggcacctttcatgtggactgtgacatgcatagcagcccctggagctgtgcactgcagcagccctgtccatcacccctgcttatcagacggtcaggaatgcaggtgcttcctgcatcatgtcacctgcattgtgggtctggaggaaaatgataagtttttttgctttatgccctggtgacttagagatagtaataaagccagtgttgctctgaaagatgcttctaatggctcagctctcttgaagtcaccctggggagatcaacaccaacaccaatggcaaaaacaatggtactaacaacaattctagtaatagttacagtcacagccatttactaagcgcctcctgtgtgccaggcgctcttcagatgtgttctctcatttaattctcggagcagcttatctcagatcttcatctgagaatactgagtcactgaagttgagtaatctgtccaaggcctaatggcgaggaggtggcagagctggaactagagttgaggtctgattctaggactaagcttccaactgctgtaggttgggggaaacatggtgtcatcagggtgtcgctgcacaggagtgtggcttgggttggctgtgaagtgattcatggaggtggggggaagctgatatctttctctgctttgactgctcccaccatctatggcagagcgtctgtatggatgtaccatcctcgcagaaggaacccaacagaagtcacttggagaatgaatccaatgatttcattgtttaataaatgagattacatgaggcaagctctgtaaagtgtctatcacagtccttttaattatagttaacatttccggagtgtcaggccctccatgtatggatgtgcaggttgggcactgcacaaggacactgtgtctaaggggctgcatttctagcacagacaccatatacttgtatttattataacaatttcccaataggtggcagtaaagtgtcttgttctaataaactcagaaaatatgacaactttctgacatggaagtaaagagtcttaagcacatttttctctaattgtcacaaagacaccacatgggctaatagtcctgttgaaggtttacatgaagctctaaaggttatacaggtattaacttcctcaaccctcaccctaacctttagaggttgacaacttttgctaaccattttatagatgaaaacattcagctataggaggtgaaataatttatttaacgtcatacatagtggagttaggactcacacctgtgttcctaactgctgttattggtggttaactatctaaggcagtacctgcctcccttgccccaccttgcttcctcatgtagttctttgtgatcattgaggattcctgcccaactctttctggcaaactcttagtaggccagaattgacacacacttgctcgtctctgtagtggagagagaccctccccagcagtgtgctttggtgctctggggagccccttctcccattgctcagttgttctctttctggctcacaatgcaagtattctgtcctcacaggggacaggcgtgagaggtgggggtttggggctggaaggtgtctaggggtggggaagaaataccaggacagatgataacccggaagggtctgagccaggaggcaggagaaccaggctggcgggcaggcacatggtcctctctgggactgagaggggctgaagtggatctgccaggatggaataggcagtgtgtgcacgcatatgctgtgtgcgtatcagggaggggcagacccggagcagctcagggggcatcagagcctgcattatgggaggaggggtgacgggattcagttggaacaaggtgacctgaaccctggatgaaggtgctggaattgtgatcctggagaagatgatgcctggccgaaactgacttagctttttcgtttctgcctccctgtttgtccacttctgtctttccttctctgtttctccctgcacttggcatttctttctgtcctatctgtccttctctcttgtctttttgccttggtcttccttccacctttgtctccattctacctgctgtccactgcagtctgaggacacagacctgccctacccaccaccccagagggaggccaacatctacatggttcctcagaacatcaagccagcgctccagcgtaccgccatcgaggtgagccgtccgggcctgggcgtgggggctgggagcagcctgcccttccccttcctggccccagcctttcctggggcccggggccttctgagccactctcctcattctgtgtgcttagatcctggcatggggcctgcggaacatgaagagttaccagctggccaacatctcctcccccagcctcgtggtagagtgtgggggccagacggtgcagtcctgtgtcatcaggaacctccggaagaaccccaactttgacatctgcaccctcttcatggaagtggtgagccccacctccctactgtccccttccagagtcctggggctagaagttctacatgtccccgagcagcctggggcttgtgctccaattccctgcgggatccagggtaggacccctcactttcctgtgaacatggggagaaatgctcataccctcctcactggaagggttcaggcctctgagtaggacaaacggggccaacctgctcctcctatacccaaatcctagatcagcgaaagtcccaaggagacatcccctggctgttgtccctctgggacaggtttcagtcccctggagcgcccttggggacctgctagggcttggctttccaggattcctccaaaccttttctgaccatgtcctcccccagcctgggccccctcaaaggagctcacccccacagccctcaggccctccaggcctctccacctccctgggatgcctagacctagtggccagagtaaggcaggtctgaggaaaagaaaatggtttgcaagatgaaagcgctgtagaaattccaggcccagtggctgtcaacagaagcctcctcttggccgagccaaagccgcccctgaaggagagcatataaattatttcaagttgtgttcaaagtgcttttggggtgtgtggggggaagaatctgggtctgtaagccaactcttgagtatccacttggggggactgtctgtaagaaatgttgagtcccgggccaactcccctcgcccgctccccagccagtgagggagcgcagcctcgtttccacttcaggctgaacaggatgcatttggaaggtaaagctgtggggggaaagccggcctctgcatgcagcattcaaggggccgacagaaaaggtgtgtggcttcgctcgactgcccagctctgggccagccaccattttggatttctggctgtggggattatctgcggtttatagtcattttctgctctttgggcttgacctggagacttcccagagggggattcaggccagtgcgttcttcctcctccacccagatgctgcccagggaggagctctactgcccccccatcaccgtcaaggtcatcgataaccgccagtttggccgccggcctgtggtgggccagtgtaccatccgctccctggagagcttcctgtgtgacccctactcggcggagagtccatccccacagggtggcccaggtaggggaaggggagatgatgggcaggtcagggaagggggagcctcagggccaagctacccttcctagttgagatgcatcctgaaacccttctcttacggagacctgaatgagaagtggtttctgctctgctagaccacagggtggagaccttccttagggcagagcctagctctgggtggggggcaccaggagcaggtgactgatacccgttggagctgaggggtgagggctcaaagtgggcccagggggagggagagagagggcagggagacaatgatgcggggagggaggaaagaaatgtgaggagaggaagacagaagtgggagacagagcatgtgaaggaggatgggagagatggagatgagagagggacttattgggaagtaggaagagagagataccgactgagaaatgtggagagactgcagggtcttgtcttggtcccttggttgagccctggggctggtgaggggcgagccttttgagagagcccctctcaggcctggatggctccctcccctgcagacgatgtgagcctactcagtcctggggaagacgtgctcatcgacattgatgacaaggagcccctcatccccatccaggtaggatgggcatcctccagggaggcctgggtcacctttcccctccattcctcatcaattcccaccccttctcccctacccttcattatcacacagcctctatacacatccccttctgggctctgcggttggacactgtccagtagagagacccagatgggagctttcagtctggctgaggggggtggggtgtgctcatctgggcaagactcaatcccttttcttggatgcatatgtgaaaaataggccatctaccctgggggccatggtgagggctttctcctggagatcaccagaaaatcagggtgaggagcaaatgagagaaggacgacaggggagggagtgagtgggccatctctggggtcctccagccccatctccctatctgggacaggccccttcttagggggaaggttgttctgtgggcttgtgcttggtggctccttggagacagcttagaaagaagaggctgtgtccaagccaagagtctatctcgccccattcctccatctgcagggaaaaggaggaaggaggcagggaggggccttattctaaggtctccagccctgggggaggtaggagtcttccttttgctgcatactcagcaactgagggccagcctgtgatgcagatgccaatgccacagagcatggcaggaggtctgtggcaccttgtgctgaggggcagcgctcccccgactgtgggccatggagtggctctggattctgtagggttgagcccatctggtccttcccacagtagacatggagaaaggtctcactgtgagcaccagccttgaactcaccatctgttccaggttgtcaccctcctctctgggctttgcaagatactggtcatacccctggcaccctggggctcccagaacttctgggccacccagaggcagagcctccaggcctgtatagacaacacctgtgtcctcgggccttgctgcatctgtagtttcactgatgctaaaagtcctcagaagccctgtgttccatctctccagcctctgtggctctccagggttctgccctgccagcctttctgctgggaagacctcctgccccctgtcccttgtccaactcttgatcattgtttaagacttaacttaggcatggtcgcttctttgggggagtctttcctggctcctcttctcctgtgagacttgcctatctttgggtcactgtgctgctctagggcctgctgtctctgtcaatgttagcatattccccaggctaagctcaggggagcaactgcggctccttcctctttgtattctcaatgctcagcacaaggcctcgcttagcggaggtgttaatgaaagtctgtctgtcttggcaagtgggtagatgggtgcatgggttgatggatggatggacgaattttctggctactgtctgtatggatctgaggaggaatctctctcttggctggggaaacccaaatggaaatttcagatgtccctatgtgaaatttagctaaactcagtgctagtgcctctgggctgcttgggtgtttatagctgaattaggcagataatttgccccaaactctggctgcctgctcctggctcctgtttcccggctgctccatgggcctgtctgagattgtgcagggaagtgcagggcctgcccagcaggatttccgttctgtgtgtgctgccctcaaaatgtctacacactcagatggggagggactattttaggtcctgctggccacaagcacagccagaggcagacgatgaggaggcccagcctggccatcctcccggcgttgacatgagggaactggggctgggatctgagccagagctgggcctgtgctgtttgtgggagcacacggccactctggctagagctgctggccagaccagcagcactggtgggagctgggatggggctcctggaggtgtacccacctggggaggggctgggcctcccctggcctgggacaggggaggaggaggaaatgacactgatttgctctgatgggggaggcttggaccttgccctcatggagctccctgtctgatgaaagagacaaaactctgttctcaaaagcctcaaacccagcagggagaccagttctgttctgcagggagccctggccctctggggaagccccttttctggtatctgactttgttccatgtttttctctgagatctattgctctgatttggctgatccaggaaatctttcactcactcgcctctcctccctgtccctggcactctgaaggacaggcgctccaaggccaacccaggaggcagctgaccccgggtgcagttccagtggtttgctagataactatggctgggctttcttcctctccctccttccccagtgcagatagcatgaagggccctggcttctggggacaggagggacgagaggtctggcagaatctggattttggctggcttctgtctgccccaccggtgtttctcggcagcctgttccatcctcacagttgatgcagccctggctggtgctggatgtgttcactgtgtcctggctgtggtcctaggacccctcctagctcaaacctgctcttgccagagttacccttccatcttggtcccttcctgtcactttcctccgtgacaccttctctctgctcccaaagccttcttaccagcatctgcctaggtcctgggatgagctggccacacatttagaacatgtcaccggagacccttgcctgatgttcaggccatgggctggcactcaccacggagtatttcttaggtttctagaaatgttttggtttgtgtcgagagtggccaattctggaggtgactcaaaacgtgtataaggcaggtctgtgctcagcatcccagggctcgtagatcagtgtctgtctctaagggtaagggtggggggccctgtttagggggtgcctggcctgtttaaactgttctccatggtgatgaggattgggatgagaaatactcacacgtattaactccaccacttgttcttggtctgtgcagccatcctatgtgtagactttagagtggcagactaggggtgggggtggtgtgtgcacatgagtgagcatgacaggtgggggtggtaggagcaggtgtgtgcacgagcttccatgggtgctggccagaggtgtgtctaagcttggtggtggcattgcaggaattgtggccttgactttgaactttctgagggcaggcctgggtgtgtcctcacacagggagagcagaagtgtcctattccatctagttctctgctttagaaaacgatatattcattttttcagataataaaatgatacgtgttcattatataaaatttggaaaatatagaaaaataatgaaaaaatagggcttacctccatccaaacacacaatttgaatgcactgcacccaacatttcattgtcattctttcctcttctttttaggtttctctttctgtctctgattctgtctctgacttcatttctacctttaaaataaaattaaggcctttgttcactagttgttgttgtttttttattaaggcagttcttggtgttatgattatgattaggggaagaaaaacagtgttcaggaacacacagagagcctgccaccccctgtccatttcctatagagggtcttgaagctccaaatagaggctgtgcccccagaaatcgcacctttgaggcactgagatgcccccagagccagctgggtatggcaagggcggctcttgcttagcattccgagagagcactcctaggtagaggggctcctcttcaagtcctcagagaaggagaatttcgggaggtgggaatatgtgagtgttgaagaattagagaaataacttttaggaagttccgactctggtcacaaagagacaagggatgagggggtgtccagaagatctcaaatgagtgatgtcaaagtgaggagatgtttcattaacaaggagaccaaactcttggagtctcctggccctgcaagttcaccataggctaagcaaccagggaagcttctccgggaaggcggcctctgaggcgggtgggtgaacaggggaggacagggaggctttcctggcaggcaaaagggctcgggcaaaggcttggaagtgggactctgtgtgtatgttttatgtggcaaaggggtacgtgtgtgtatgtatgagtgtatgtggtagaggtggtgtgtgtgtgtgtggtagaggtggtgtgtgtgtatgtggggtagaggtgatgtgtgtggcagaggtggtgtgtgtgtggcagaggtggggtgtgtgtgtggtagaggtggggtgtgtgcgtgtgtggtagaggtggggtgtgtgtgtggtagaggtggtgtgtgtgtatgtggggtagaggtggtgtgtgtggtagaggtggtgtgtgtgtggtagaggtggggtatatgtgtgtgtgtggtagaggtggggtataagtgtgtgtggtagagatggggtgtgtgtgtgtggtagaggtggggtgtgtgtggtagaggtgtgtttgtggtagaggtgtgtgtgtgtggtagaggtgtgtgtgtggtagaggtggtgtgtgtgtttggtagaggtgtttgtgtggtagaggtgaggtatatgtgtgtgtggtagagatggggtgtgtgtgtgtggtagagatggtgtgtgtgtgtgtgtgtggtagagatggggtgtgtgtgtggtagagatggggtgtgtgtgtggtagaggtggggtgtgtgtgtggtagaggtggcgtgtgtggtagaggtggtgtgtgtgtgtgtgtgtggtagaggtggggtataagtgtgtgtggtagagatgggatgtgtgtgtgtggtagaggtggggtgtgtgtgtggtagaggtggcgtgtgtggtagaggtgtgtgtgtgtggtagaggtgtgtgtgtggtagaggtggtgtgtgtgtgtgtggtagagatggggtgtgtgtgtggtagaggggtgtgtgtgtggtagaggtggcatgtgtggtagaggtggtgtgtgtgtgtgtggtagaggtggtgtgtgtgtggtagaggtggggtgtgtgtggtagaggtggggttgtgtgtgtgtggtagaggtgtgtgtgtggtagaggtgatgtgtgtgtttggtagaggtgtgtgtgtggtagaggtggggtgtgtgtgtgtggtagaggtggagtgtgtgtttgtgtggggtagagttgtgtgtgtgtggtagaggtggtgggtgtggtagaggtggtgtgtgtgttacaggaggtggtgtgtgtggcagaggaggtgtgtgtgtggtagagggatgtgagtgtgtgtgcgtggtagagatggtgtgtgtggcagaggtgggtgtgtatgtggagtagaggtggtgggtgtgtgtccgtgtgagtgtgttttttgtgtgtgtggtgagcgtggggtgccagcaggagacaggcctggcctgctagtgtgcaggaggcctcgggagactgtttcctcactctgtcgggtgggtgctggggctggccggctctgggactcccaggctcccaggctcccaggcgctggggctggggctaattttgagcctgctgctccagttatagtctctgggatgccgtgaaggtgggaacgtgctcccagaaccggagtggcaaattatgcccgagtcccaaaggggaacgtgtaatttctgaagctggaccagatctttggagcactatgtttagctttattttgctctggtgaactgccggtttccctctcacctttctaaaaaagaactgcattaaaaataacagtaaggcttctgtggggttcaggatgcaaatgggaggggcagagctgctgcctggcgaggcccgtctctggccagctaggggtggcacgtggagttcacccagtctattccaggggtcacacgacatgtggccagcaccccagggccatccagcagccctggctaggtgcccaaggctgattctgccctcctgcgtatgcttctggctctgaacagccctgaggggcccctcagtgatgtgtcttttcacagagcagggagggatccgagtccccaaacgtccctcctgggcccagcagggcttcaccttccgtgggtttctttgggcatcgggggagtgtcttccaggatcttcctgttgaggaaggcagggcagcctggggtttcgccccttggagtcctcccagagccccctgctcaaggcttagaggttgaggggccagccccggcagctctgggtcctagctggctgcttcccagcacctaccctcctgacccgtttgctctttctcgaacgggctgtgcttctttcttcccctctacctttgcgcttgcgattccctctgcctagcatgcgtcttctcaccttgcccacctgctagcctggtactcattcacccagagccccatccccttatcctagagtatcgtagtggtctctgaacaagtcttcctgccttcagccctgagccctgaggccctcctcaggctgcagcccaaggattcacagtacagggagattgattcacagtactgggagattgtaggcaaggagctgatgctcagaaaaggatgcagaaagtgatttgtagcatggagtggaggtgggactataagactcctaaagtccccactgatgtcaggttttggggaagacatatgatgccctggttcttgtcctggaggagggaagactgagtaacctgctgtagctttgggaaccatgccctgcagtgttggtgtggctcagaggttaggatgctggggttggagtgtccctgaaataggcagattttggagagggagggaggacatatgagagagtgggcaagagtcaggcattggctgagccccttccacgtgccttgccttgtgctgggcgtgcacagccttcgtctcattcatactcactgtcgccctgtgaggtgggctttgggcccattctccagataggacgctgacccagagaggtcaaggggcttgctcaaagtcacacatctggtgaggtgttggagccaggcttgtccaactccaaagcacatgttctccctggaggaagagcagagggtgcctggtcagagagcgctacctcttggagactgtccagccttccctaaagtgggttctctaatcctgttgctaaccagcatgtttcatttgtagcttgcagacggtctgtcgagcttggcccccactaacacggcttctcctccatccagtcctcatgtatgtactgtttacttatttgtgggctccttgtattcccttgtggggctgggggtaggggggttaggagggaaatgggaggggagagtgggagggaagaaaggaggtatttcctgagccctagcagggaagtcacctatctttgcctcactgaaaaggaggggtgagagaaagctatggagtagatgctcagaaatggacacccctaggttacttcctgggatttaccttatttacctgtgtgagggctgggggcttaggtggggctgcatgggccagtggaagcggggaaatctctcaattagactctgacttctggagtgtgggaccccagaaggctcttctgggcgtgggacctcagacggcaggctgactttctgtgctcctccctgatgtgtgaaggatgtgtgtgactgaggaaccctggctggcccctcgggtgctaagaggtctgctggggccaacagtctgctcctgcagtttccagcagggctcctttctgcttgcctgagtggattccttaggtgtcatctttctgggctgtgggtccctctaggaagatgactttgatgtctggccttcagcatgcgctcctgaagtcccatggtgagggccagtgggagcccctgacctgtggagggtggcgtaagagacagaacttgctaaaggcagcgagttacattctacttatggtgtcaagaggaggcactgttgtactgggggtctcatgagcttctagaaggaggctatcgatatacatatttttttctgatttatctattttaaataaaatatggaaaacacaaaaagtgtcaagtaggaagttaaaaccacttttattcctaccagtttatgataggcactgttagggttttgatgtgcctagattttttagatatcttttaaactcacatgaatactttttaaaaacaaaattggaatcatacttttttataatttggattttttaaatttaaaagtatatatgaatatttttccatatttgtatgtgtgtatatataatatatgtataatatgtatgttatgtatattatatatatattttttgagatggagtctcactttgtcgcccaggctagagtgcagtggcatgatcttggctcactgcaacctccatctgctgggctcaagcaattctcctgcctcagcctcctgagtagctgggactacaggtgcgcaacaccacacgtggctaattttttgtatttttagtagagacggggtttcaccatgttggccagtctggtctcggactcctgatctcatgatctgcccgcctcggcctcccaaagtgctgggattacaggcgtgagccaccacacccagcctattcttatattctttaaagatatgactgcatgtcacatgaacattcgtaaacttttaactactccctatcatttgccatttaatttgtttatttctcctattgtcttcttttgtcccttaaaggacttattttagttcactttatatatgtccattcagatgatttctttgttttttttttttttttgttacgcccaggtacatctgttcaggccatttcttgttaaagtgtattcctaggcattttatggtctttggtgctgttctaaatggaatatatgttttcctcatgactttgtcgaactatcgctagaatataggaaaacaatatttttgtatatttactttggaactgactctttattaaggcccatttattagttctgactattgttaattgattctgtttggttttccaagtaggtaagattgttttcttcaaataatgataaacgtgttagtttctttctaatagtaatgcctcattcctttttccaaataccatttgatatttgagatgctgctgagcagacttatttagtcattcattctaatgagactgcctctaccagatttccattaattgggatgatgattgatggtttcagacagatatttgattttggcaaggttgtgtcctttattgtttgtttgtttatttttttattgtttttgagatggagtcttgctccgttgcccaggctggagtgcagtggtgttgtcttggctcactgcaacctctgcctcctgggttcaagcaattctcttgcctcagcctcctgagtagctgggattacaggtgcccaccaccgcactctgttaatttttgtatttttgtagagacagggtttcaccatcttggccaggctgatcttgaactcctgacctcaaatgatccaccctccttggcttcccaaagtgttgggattacaggtgtgagccaccgcacctagctgattgttagtttattaatagcttaaaaattagtcatggaagtttaattctatcaaatgtcatttggcatttattaagatgataattttattttccattgtctgttaatatagtgtataattgtgctatattcctggggtaaacccaaatcggtcaattggtcatggtattatagtttactacagttgcagccttcttatccaatgcaatcgagacaggtagtcgattggctaattgataaagttgattaaatagggacttatttttttttttaattgtactttaggttttagggtacatgtgcacattgtgcaggttagttacatatgtatacatgtgccatgctggtgcgctgcacccactaactcgtcatctagcattaggtatatctcccaatgctgtccctcccccctccccccaccccacaacagtccccagagtgtgatattccccttcctgtgtccacgtgatctcattgttcaattcccacctatgagcgagaatatgcggtgtttggttttttgttcttgcgatagtttactgattaaaagtcctgcaaatgtaccacaaacattttgtttttaaccatgtccatgtaactttatttgccaatcatttgacatgtgccacaccctctttttgaatttggatgtgctgacttgtgtgtcatgtcatccttttggtataaatcatatccaaaatgcattatccaggatttttagttttaggtttattaaaatttgatgagaacttaacgatacttgcaaaaaaaaaatctgagtgtagagtcctcttaaagtttaagatgcccttccaccttttatgttatctcacttgtacttgatattcatcacttaaaaaaaaaatcaaaagcaagccaggtgtggtggctcttgcctgtaatccagcactttgggaggtcgaggtaggcaaattgcttgagcacaggagttgagatcagcctgggcagcatagtgaaaccctgtctctacagaaaatacaaaaattagccaggtgtggtggcacatgcctgtagtcccagctattcaggaggctgaggtgggaagattgcttgagccccagaggacgaggttgcggtgagccgtgatagcatcactgcactctatcctgggtgacaaagtgagaccttgttgcaacaaacaacctcaccaaaacacaaaagccttaaattagttttcatagatacaatgcccttcctttttatattcaaattctatgtgtttttaaatatatactttgtttatccaattaccatattagtacaacccagctcatcttctggagctgcagtgggcatcctagaacagctgtggacagtcagtggttctggacctcaggcagattgttggcagacaggacagacagcatttgttaatcctggctaagaagttttaaggagagcttctattatgtattattgagttaggtttgctactacttaggatttttacgtctctattaataagtatgactttcgagttgtctttgttacactttgatatcggggttatactagtcccttaaaaggcttttcaggtgtacttctactttctgtgctcttaaacaggctctgtggcatgataattattgttgctgaaaggccctaaaatacaccagagccactgtttatgaacttaaattatgcaatttggaaattatatgatacaaatatttcaatagtttggctttatgtacaaaatgtgtaatagtaggaaacctaaatttaaaaaaaatgaccgacaatcatgtaatttaaaaggtggtgaaattgtatctatggtttcctaacacgggatagccatcattttttctctaaaatggtgttatatgttttgaattatagaagattttcaggaacgcatatcttatataattgtataagatgcaactgtcttgtatgcattcgtaaaactgggctcaacacattttctggaggggattctttgatcattttgtacttcttcaatcaatttggtagctgagatgtcatcagatactgcctgttaacactggtataaatttgtacatattactataatgaaagctttgtatctattctgttttcatcttcattcttaattttatgtatttatgttattttccttttttattaggcttcatatcgtttcatctattttatagttgttttccatccaaagaaccagctctttaaaaattctgctgatattataatagattagtttctttaatttctacattcaagtcatttttaagctctctcaatctgaaattcctattatatgtattctagatatcttgggttatcactttatctctttctctctctcttgtttagaaaagactgttaaagggagctatttgtctatattttcttctaaaaattctgaagttttgcttttcacacttcagtatttatttcacctggaattgattttgcgtgcgtgttaattgtgaggtagagtttttttctcatgtaactaaccaatgaattaatatcatcatagaatgatctgtgctttctcattgatccacagtgacagctgtgtcatttgttgggtttccatataagtgtgggctatttgtgggctctctattctgttccattggtctgtttgtctttctctgggctattttagtatcttatttactatagctttctaataggtcttgatctctgataaggaagtactttgttcattttcagaagtatcattgctattctagtcctttgcttttccacttcagttttagaatcagcttgtcaacttaaaaaaaagttgagatttgtgacagagttatagtgaattgctggatcagtttggggaaagcagacatttttattatattgccttttaaccatgaacataatatatctttccatttatttaggccttctttaatggtaatttaatgcatttttataattttatccaaaaatgtctagtacaacttttattatatttagttctagcaattttatgcattattgttctctttacttgaatttttaaaggtacattttctgactggtttttgcttgtatataaatgaaatcgattctcatatacagattttatatccagaaactttgctaaactctcttatgaattatactggcttgagaattctcctggattttctatagagtcaatcatataatttgtgattaattacaattttaattcttctgtctatatttcttttacttttttattttattttcttgtcttattgccattgactagaaccttcagctgatgttctatgtacttggttatagagagtattcttttctgctcctaattttaaaatgaatgtttttatgttttaccactgatcatcaaatttatcaggtgaacctagttacctgttagaatcttactagttagctgttttttttcatgaatgttgttaaattttattgaatgtttttaaagtatccatcgaagtgatcatataattttgctcctttaacctgttaatgtagtgaattacattaatatataatacataattatataatatatttacatatgttaattaataacccaagttatctaaaatatatataacaggaatttcagcttcagagagcttaattacagtaataaatatatctatattagtacttaaacaactttgcatttctgaaacaatctaagctgatcatgatatattatcttttttctgcattgctgggctcagtttgcaaacagtaagtttaggactttttttgcatcattttttgggatgatattggcttaaagtgtttctttttcatactattattttcaggtttataaaatgacttctgttgtgtaagccgtaagattggcattatccgttgcctaaatgtttggtagattcactcataaaactgtctagacttagtattctttttgggaatattttaaattgctgttgcagcttttaaaaatgtttataggacctttgagattttctgtttctaagtgagtgacttttggtgatttaaattttctaggaattatctatttcttcctaaaaatattggtgtaatattttttatgatctcttaatttttcaaaaagaatttcttctccatctagttatgcctcctttcattctcaagattatattttattattcttgccagaatttatcagatttttttcagtctattcaaagaatttttagttgatcttctctattatttccttattttataatttattaacttcttttcttctattttattccttccattttatttcttttcttccattttgggggagtttattatattttaacctctatgtaaacatttaaggctctaaaattccctctcactactgctttatgcatcctgtaggttctgacaagtaatatttttgttatttcccattctgagtattttcggatttttattatttctttttgacacctaaattgtctaaaaatatggtttttggaagttactaacttatattttaaattatcttttgttattgatttctaggttaactggaatggtctctatggtccagagagtgtagtctgtgtgtaacgatataatacttagaaatggcctgacacttgctttatggtctagtttaaatctgtaactgtcctgtgtgtgcttgaaaagaatgtgtattgtccagatgtcttaaatattcaatgtgcatttagaacaggcttgttaattgttattaaaatctgtactcctgatttttgtgtgtgtgtggtttatcaatttctgagcgagacatgaaaatattctgctttgatgtgacatttgtcaatttctccttataattccacctacttttatatatttgatgctctctatattttttctctctctatagagaattcttatatcttcctggagaattgaatcttttaacaatatgtagcaagcctctgcccatttctgtcttttaaaatctctgctaatgagtttttcttaaagtctgttttgttcatgttaatatagctaccccagctttcttttggttagtattttccttgtatagctttttccaccttgttactttcaacttttctgtctttaagttttagctatctctcctgtgaacagcaaatagatagattctatttgtgtttaatgcattctgacaatctttactaatatatttgaatttgtttctgccatcttattttgtatctctatcagccttttttcaattaaaatattcccctccttttttccatcccttctcttctttttagtttcaaaactatatatgtttctatttctttagtgattagtatagaaattttaacatggcatatttaacttagcaaagtctaaatttaattggtatttatatcttcctccagaatattacaaggaacttagactgctttaactccaatcacctatcaatttgcaaacttttgtacaatattttagttttatcttttttacctacctttttaaagcattattttattttaagtaatcatttttttcttttagctatattcacatttactttttttttttaatatccgtcatctttttcctgaagtagggcctattgaaattcctataattgaggtcagttcattataaactttctcactttttaactgtttgaaaatatttttttcacccttatcttggaaataatagtttcactaacagttattttctgtcagcactcttttctggcttccattgtgctattgttttcacaaatctgaggacttaaaaaaattttattttaaagttaagtttagttttggctgggtgcagtggctcatgcctgtaatcccagcactttgggaggctggggcaggcagatcattgagctcaggagttcgagaccaacctgggcaatggtagcaaaaccccgtctctacaaaaaatacaaaaaattagctaggtgtggtggtgcatacctgtagtcccagctactcaagaaactgaggtgggaggatcgcttgagcccaggaggttaagggtgcagtgagccatgattgtgccactgcactctagcctggcccacagagtgagaccctgttgcaaaaaaaaaaaaatttaaaaagtaaaattagtttaatttaatttttaaaagatgttatttttattcattctgagcaattctcaaccattatctcttcaaatgttacagattccattctctcatcatttctggaactctggatatacagtggacctcttctattcttcatgtctgtcaaattttctttcatattgtttatttctttggattgcactctggctaatttctgaagatgtatcttcttgttcacttgatctttagcagtttctaatctgctattttaccctatctattgagttttcagtcttaagtactatatttttatttctaaaagttttattcccccaatctgcttgtttatttttgaaggtctcctgtccctttgcaatatttttaatgccttttatttatttaaacagtttttccttaaagccctatttctgactactctgacttctgttgtctgattctgcaattggttggctctagctggctcttgctcatggtgcctagttccttatgtgtttgattgtgaactcatgttccttggaactttatctgagaattctttggggcctgggtggaagttacattcttttagagaggatatgtgtttacttttaccagatgtctggagacactataaacacagattaacttaaaactaaatgttcagtgtgtggctttttgggtccactagttagtatgcattttggctccttatttctctggatttttcctttctcatttgcccttaagaattttctttacattcccatcagctcagccatgcatttaaaatggattttagaaatatcttttctgttaatttaggtgttcttacttggagggtttctctggttgtctaatttgtcattttgctggaaatcaatgtctttattagaggtttaaatttgaagtcatggttttcatcatgcaggtttatctccttcagggttgtgtactctaatttcttgtttgcagtttcctcttaagacttcctatgaatacacatgagccatttgttttcttctgctttttactcaactctttaagagcattgggagacatttgtctttgtcttcagatcgctcttcttcttttgcccttaatatcttcttttttttccttgtgtttatccttacagagggaagtccttgcttgtcaaatactgggacctcagttagattctttccataaattcatgggcccttctaatctcaaactcagacaaaaagaagaaggaaatagtttagatttgcagtagtttcactttgctggttagaaatccagcagggtgggagaagtaagaaggaaaccaggatcagaggcagctatgtggggctattcttctgggctgaagagtttatttcctatgtttgttatggtagtcaggggttagctagggtaggccagagggccagagctgctgcgcctaccaatgaactcctatgtaggaatttcttaagtaaagtagagttgaccctctcccactaggcccaccaggcagggtgttactttagggaagtttctacagttttggctgagtgaatccttaaccttgtgggttcagacacctgttgggtcaattttctcacggctagatgtgtaaacttacatgagaaatatagctccctggggcatgtgaccttggtggctggtccagcccatagtctcctataggctcagtgagtgggaagccaaattgtgattaagagtgagaaatcagaatgaggagagagagttctgtaatttgaactttagtgccagctgacttggcactgacacatccatctccaaaggtaggggcagctttagtccctaagcctaggtctgctctcccctgatggtgctggtgtggacacctgtcagtgtttactccttactcctgtttgcctgttcttcaggcctgattagtacctttcttcatggatatgctctttctctggattaatacattcttcctaattatggttaagtcttagtgtaggaggcattcttccctgttgaggtgactttgcctctccttgctctcaccgactatgaagttatttcatggtctaattctctaagggcagccctatttcccttaattccaggttggggggatgtgggatgccttattgcagctcatgagtactgacaacaatttattccaagactttgaagcaaaggttttctgagcaaaggaatcaattacagggtgtggctcccaagtgaggaagcattttcagaaggcatccaaggcagtttgtctctgaacttcatggttgcacctctgagcttgagacttagagggggagtattttaactttaataacattcatggttttacctgtacttttgtacatatcagatgtgctaattaggaagtcacttatcttttccttaaagtaggtttcctaaggacatgtatttggcaatattggtttagcaagaattactgtatgtgcttgaaagtaactgtacttctttaaaaatatcacccgttcagaagtgttgccagtgaagcctggcctccccccactcctattagttctgattagggaggtttgatgcccgtcactggtgtaatctggaccttcctttgtgactcattctttctctcattttctcagagcaaatacaaatcgcccatcaaatgacaagtgaaagcacagggggaggcgaggggagggaatcagggccgaaatctgttagctatttggagtaattggttatttgctgtgtttgctggttgggaagcagagcacatacttcacggtctctcctgttacgggggctggagtcaccctccgatattggatcctcgttgccggagcccttggctcggggcgccttttccctgcttggcattcctgtggtctcctcgggagtgcacccctcctccctcgctgcacactgcaggggggacagcctggggtgaaacttgtctggcaaacttcagggctccatcagggaggaggaggccctggcttccaccatccggcgctccttgcctccacctcatcctgacataacccctccaccaccccctgccccaagaggtctttcccctggtctgagagggatctcttttcccatctagagaaaaaacactcatctcttcctagagggatattcttggcttcccttggaaatctacagcataggcaactgtctctgaggtctaacttgatgtcttcctatctctattggtcctatgcactggctactccctagcctgggtcaaaatagtgcttggaagttggtacagcgctagctgctgagcacaagactcccctgagtgtgcttggtgaagcttattaacccaccttttgtctttaactcttctctacattaaccaaggcacagggaaatcagagcaaattagcaacaagttcaaaatataaaatatttgaaaagtaatgtgattttgtatatgaaaatgcatacagtaactagaaagtaggttgactttggcacatagtaggttccccccaaatcctcttaaaattgaatttaggagagctaatattagtgtctgtagcttgatgaatgcttctgcagtcttgggaaggccttcaaaaatagtttttctcttaagtagttgtaactcttgttaagcaaaattgtctacataagcagaaggaagataaggtatgctgcccaggccctattggaattgtcacagattctgaattagtcatgttttgttgctttcttcatatgtttgaagagtctgatggaagcttctttcattcacctactggctaggttccattcctctaggctttctgcatagttgtgtgggatcatggtgccctcagagaatccagtcatgggcccccaaggatctatcttagactcctgaattgagaaagcaccagcaacctcgggttccccacagctccccgactctctgtgagtcccccatctggtggagcaggccaatagtcaagtgatcaggtccccttgccatctgtttgactttactggatgtcaggcccatgtagtctctgggcctttggaagcaattcagcattttggttaaaggtctttacttctttcccacctctgctgatccagaaatcagagtaggtggagtaatgatcccctccacagatgaggaggctggactgcagggagtgtcaacaagaggttgaaagcccagtgttccacttgtagaaataattaagtgacttttgttataagtgtgtggagttctgctgaatcaacgtggtggctggctgtgggcatatgtctttgtggctttggggggcataagtgatttggtatacacagggtggagtagttttgaagtcggagtatttgcatgtctggggttttgtctggtctacatgtaggcatgagtaattttatgttatttatgtgtttattcatgtgtgcatgagtaaatagtccatttcctaaatctcaggacatgaaagaattagaggaacctttgtaccgtgattccagtactacagatgtagagctatggggtagcagtactggagatcaaactgatgacactggcaatatcaacaagaacattaatcatggtaaactttacaggttacagcatatctttgtagatatctactctgagccttacagtaaccccagtgttgggttgttatgttactatcttgatgatgatgatttgtactaagagggaaattactttcagcacagtctaggatgtctatctctgggttgacataggcatgaagggctacttaaaattataaacaataatagaccacatttttttttaagagttgggcatatagttctgcatagtgacccaaggtttaacgttataacctcggtgacaaatggatttgaccagaaatttttctctttgatccaactggtcatcctggggagagaaaacaagttctgtacctgccccctgtctcctgcttcctgacttcacagaaaggaattattattgccagtttttccacccgtattcatgaaatgtgttaggtctactgaatgatgatgggagattaaatatttggaacgtatcatactgatttgggtcttcagggggattaaggtgctcattagactggatcaagcctggagaaatagatctccgctattttctctggctgcccaggaactgcatattggctattagctgaaactggagaggcttccagtccatgccttggtcggacttactgggttggctgactgcacaatgaggggccttgaaccttgagcatgggggagtggtgttttaatggccagacttcttgttaaagcctaaggtgacacttcaaatatcaaaccttttgtgtttctttttcctccttgccatgttccaaaactggatgcttagctattgcaaaatgaggtaaaaaacacatttggaatgagaaaacataccaccatttcccttttggagctttggaatatgggattccattaacatcagagggttagttggctttggcacctctgagttcagacatggaatagctgtcctgttttttgtggggctctttcttatggctgtgctaacttattcctggacttcccggggaagagaagggagaagtgggcttgaaataactccatcagaagccagatgagtgaaatagcagaaatgacattttcaagtcacatctgtgagtgtgttaaaaatataactttatttttctgtaaatcaacttaatctctcctgtgagcccacatttttcctgatggcagaaaaaccccggtaatcatcaacattttaggtttaaacttaggcagtctgggctttctatcttcctccttaaccctgggaggcagctcagttctgggttgggcttccataatgtcatgacctccacagggaggaagtcctggtcaccagtatgtgtctactctgacatttagagacccactgatttctgggcacacaggccatactgcatcttctcatttcagcccccaaatccttctagttttcctggctctttctctctccactaactttcaagccctacagggagtggggcaccattaagcagctctcccatgacactctggggtctgtgggaaattccaagggcttaggctctgtctcccatgacacccatgcagccatctccaatcaactgccccacagccaattcctctggcaacttccgggtggctgctgctgcctggacccccaaagttatagaggggtctgttccgtgtacactttggagctgacctggaggcagggtgtgcggtgccttatcagaaaccatcacaagtctctagttctcgcttcctttctccttctacactttcatttctttcgcctatgatggggaaaaactggctggacaaaacattcttttaaacctattattttaatggcacatgatcagcctttgtaaacttaaaagccaaggatcaccccctctttccccacattctgctgtttaggcattcctgtatccatcaaatattgacagaactgcaattatgtctttcaggcaatgttctaagcattgaggttatgagtgttacaaaagataaagggggctgggtgcggtggctcacgcctgcaatcccagcactttgggaggcagaggcgggtggatcatgtgaggccaggagtttgaaaccagcctggccaacatggtgaaaccccatctctactaaaaataacaaaaattagctgggcgtggtggcacacacctgtaatcccagctacttgggaggctgaggcaggagaattgcttgaacctgggaggcagagcttgcagtgagccgagatagtgccactgcactccagcctgggcgacagagcaagactctgtctcaaaaaaaaaaaaaaaaagaaagaaaaaagaaaaagaaaaaagatgaagggctctgccttcatggagaaggagatacaataaacaatattaatacccacgtaaaatctatgggatatcagatggagataatcactgtggagaaaaagcaacaaagagggaataggaattcttgagacgggattgtgatttacaatatgggaaataatgagggtgagactgaggctgcactggaatcaagacaagaaggaaatgaggaagtggcttagggatctatcagggggaatagtgttcctgccaggggaaggacatgagggtgctggaagtgttcaggaccaggaaggcttgttggctgcagcagcatgagtgaggaagaaagttgaaggacgtgaggtcagggaggtgtgagggctcgatcacaagcgactttagaagttattacaagggctttagttttattctgagtgagctgacaaatcactggagggatttgcacagagggtgacaagatccgatgtacatggctgttgggttgagcacggattcagggagcaggacggcaaaggtgaaggtggggaggccagttaggaaactgctgcagtcatcccacatgggatgatggggctggactggggcggtagtgacagagtggtctggttctgagtatacactggaggtagtgccagcatgagtgactgatggattaagtgcaggtcgtgaggaacaggagtcaaaggtgagtgcagggattttggcttgagcatctggaaggagagagttgccatttgttcatatgaggaaggatgtgggaggagcagactgggcagggatgttcagagataggaatctggacttagctttgcaaagcctatcagatgtccagtgggagatgtcacatgggcagctggagtccagggaaggcacccaggctggacagagctcaaggtgggactcatcaatgtatgtgctatttaaagagctaagacccagggagaacccaagggagtgagagtggatagagaggatgggctcaagcactgagccctgaggcactcagatggccaaagcatgggtgacaagaaggaggcagcaaagaagactgagcaggtgtggccgctgaggtgggaggacagcactgtggtgctctggacagtggagctctgcaaggcgaggggagatgcttcagggacagaggagtgaccacttctgccaaatactgctcctggattgattattgaggcctgagtcattggtgaccttgacaagaatgttttgagggaggacagagaatggaaacataaaaattagagacaataagtgtggacaactctttctagaagtttttctataaaggggcgaaggtaatgaggtggaagcccaaagggaacgtgtgggcagagagagagacgtattctgtgaatagtggggcactggtgcctatgtgtgaaggctaactggaatgacccagaggggagggatgttggtgacacaggagagggtgaggagagtcacggagtgatggccttgaatggaccagagaggatgagccccaggcatgagggcagaggttggccttgggctggggtgcaagccgagcacccacaggagcagaagggaaggtagcacgtggcatgggtgctggtgggggcttggggaagtctcttctggttgcttctgcttttaggagaaaggaagcagggacatgggctgagcatgaggccagggaggaggtgctagagggctggggagagggccagtgtggcaggtggtatcaggagaaggggcgagtaaagggccagggaagtgagatgaggtgccgggcggcactggggctccttgaagctgtgccaggaacttggtgtgagacccagcagctggtttcatggtttccttcagccacatttggttgtggggggctgatgtgaagtggagaagagctggatttaaccccaggtggcactggccagaagtacaatggaacaagagaggtggaaggagtttaggagaaggaaagggcaagggggtaaacaaagcattgtaggaccaagaaaatattagttaatatgtaaatcatgattctgccacatgcctaattgctgttaaaggtgcaggccattgattagaagagggtttacctgtgggatgcaggacgaaaatgggggcaaaagtcactgagcagccggccagctggtgtggccgggaggaaggtcataggccattcgtctcagcagctgtgagtctgctggggaacagcagctgccagacatcacctggaactttgaaggaagagggaattgcagccaagaggggaacttggggaaaacagtgtggtaagatttaggtcctgttggtggtaaatagcttgttctattaaaaaaaaaaaattgaactcttatttccttagaaagaaacacttgagattcctgcttttattcttttgtttgatgttatatggttgtatttgatcatttgttctttttaattttagcaactttattgagataatccatgtgaatacaggttcttatttaaagtgtacagtttaatggtttgtagtatattaacagagttgtgcaaccatgaccggaatccattttagaatatcctcatcactgcaaaaaaaaaaaaaaaaagtactgaagagcatttattcctcacaataactgtcaaatttatgctattatttttccatgacagattagataaatggagtcctaaagaggttaagtagtgagcagtctctcccaaccactcccagcccctggcaaccactaaatattttttgtttctatatatttgcctattctggagcttcatataaatgaaatcctacaatatgtggtcttttgtgattaaattctttcacttagcataaggttttctaggttcatctatgtcataacatgtatcagttcttcattccctttttattaccaaataatgtgccagtgtaaggatatatcacattttctttatccacgcatcagttgattcatatctgagtctttccaccctttagctgttatgaataatgctgctttgaacattcatgtacaagtttttgtgtagacataagttttcatttctcttggatatatacctaggaatggaattgctaggccatatggcaactctaacgtttaatgttttgaggaactgccaaactgtttttcaaagtgctgcaacattttacatcctcaccagcagtgtacaagggttccaatttctctatgtcttcaccaacacttattatctgactttatgatgatagccattctagcaggtgtgaagtggtttctcattgaggtattgatttgcatttctgtgatgtctaatgatgtggagcatctttccatgtgctattggccatttgtatatcttctctggggaatgtcaacttaaatacactgcccatttttaaattggatgatttgtctttttatcattgagttgtgagttctctatatattctggatacaaatcccttatcaaatatatgatttgcaaatattttctcccattctgtgagttgtcttttcactttattggtagtgtattttgaagcatcttgctgttgttctttatttaaaaatttttaatttttaaagctatgcaaggaatacttgcatacaatgaaaaattagaaatttttgagttatacacaaaaaggaataaaacatgtacaattttaccattcagagtgccactatgaacttctggggtttagtccttttgttaaaatgagatcacattattttttaaccctttataaatctcatcagttgtgagtaacttttcatgtcagtaaatatatttttccagcatcactttttaggttgtgtaatgtttaatcatatggaggtaccgttcagttccaagcagttcaggtccaaacagttccttattgttggacacttaagttgcttccaatttttcacttttaaatgaagtaaaatctttatgcatatccatgattgctttctttggatagaattctggaataagattgctgtgtcaaagtgcatgttcttttaggctatggaaacgtgcagccagtttgccttctggaatgattgtggccatccgtgccccaccagcagtttgtaggagattagctcttggccaagaagctaaccaggtctatgcaacaacagcaatattactattatcagtaagagcaataaacacttacgttgcatttatgtgtaggcacagttctgagcactctctctatattgactcattgattcctcacaataactgtcaaactgatactattatttttccattacagataattgagtccaagagaggttaagtagtgacccaatgtcacaccactgagcgtggcaggatttgaacactggcagtctagcttctgggtcctggctctcacccaccctgctttactgcttctttatgtctatatcacatgaaaattattggcagaggcacctatatgtgcaagagcccagaagggagaaagcctgatactgtcaaacacaatgctgactattgctttaaaatattctttataatgctaagaaagcttccttttatttttaatttactgagaggttcatttgagaataaatgaaaaattctaacctcttaaacatccattttttgtttttgttttgcatattataaactaggggctggcaaattttttttaaagggtcagatagtaagtattttaggcttgggggacataaggtctttgttgcaaagactcaactctgcaattgtagctgaaacctgctacaaaatatattgatatttaaattaccaaactaggtggctggccagtaggccatagttttcaaatctctgctgtagatgatcctgtgggtttcctctcctgactcactgatgctgaaccactcttgtattctggaataacccagcttgaccacgccagattgactgctgccatctgttcgttagtgttttatttaggatctttatgtctctcttcaggaatgagattaatccgtgtgtgtgtgtgtgtgtgtgtgtgtgtgttgcttcgtcaagttttgcttcataaaacgaatgtaaaaactttcatctttttctatgctgtggaacaaagaatgatttattctttgcaacactcatagaattttcccccaaagaaatgatcttggcctcctgtctttttttggaagtagatcattgagatcttttccactttcttttaaggttattgatctcttcatgttttctactacttttgaatcaattttggcaatttttattttcctagaaaatcattcacttcatctacattttctaagattctgtcattggtttcagcctcataaacctattgatattttcattgtctgctataatatcttttgatttgatttttctcattcctaatagtatatctacttttaaaaattagatttgataaatgtttatctattttttttttttttttttgagacggagtctcgctctgtggcccaggtgggagtgcagtggcgcaatctcggctcactgcaagctccgcctcccaggttcacgccattctcctgcctcagcctcccgagtagctgggactacaggcgcccgccaccacgcccggctaatttttttgtatttttagtagagacggggtttcaccgtgttagccaggatggtctcgatctcctgacctcgtgatccacccgcctcggcctcccaaagtgctgggataaatgtttatctattttaatggtcttttgaaatcttgctctggggtttaatcatcaattataatattctcctttctaatatattcatttctatttacaattttctttggtctttctgccctttctaatttcttgaattatcaggtaatttattttcattccttttgtataaaagtgaaaacacttaagataaaattttttttttgaagacaggcttagctacaactcgtacgttttgggacatatatctcctattgttggtatttcctaagtatccgaggttttagttttggttttctctttgacccaggagggctttaagcatatgcctttaaatttccaaaaggttagtattttatttaaaatttctcatttttctagttttattgcagtatggtcagaaaatgtgactgatagtggttttatttctgggactttactgagatttgctctgtggcttttttatttttttctaagtgctccaaagatgctggaaaagaaggtatatcttctgtttttagtgtaaataatgtttgtctatttagttgtcactgttaatggtattattcagactatctgtctctaattcctttggaaatttacttggttattcaggattgagggaagtgtgataccttccccacaattcttgttcctgtcttttctttgtacagaactcactggttggttgtctgtctgtgcctgactctgagcctgagttataaactcaaacctttaagtatttgggctgggaaagaaaaataaagatttaggggaactcaacagctaaattggattccattctaaccatttctacctaagtgtccatgtttgcctgtgtgccagtatgtgcagttgtgtgtttctgtgggggcatatgtgtgttttagcatacacatctcctttggacgtgactgtgtaagtcagttcttctgcgtgtgggtcatcctgtgagtttgatatgtatgtctgtatatgtgtgtcacccatagcatctttttctttaaattgaactttaaacatcaaggcttgggtctgccttgctctaagctggctttttctagagtggttacaagtcagaaagctctgccatgctgtacgctaccccacctgaccttgtttcctctctcctggctgcagaagaccctccgggtaagtgggtctggtagggcctggctgcagattcagcctcactctggtacacgttccctgtgtggtgtgtctggagacacctggccacacaaggtgtgttaggaccacacttccaggacgggtggagactcgagaacctcatcctaccgtctccccaggatgcctgttcaggaacccttggcggggcaccagcttgtgtttgcctttagtaagctggagctcagagcacttggctttagtttgaaggggccaccagcattttcagaaactctgtgataggtgttcagttcctggtggagaattagagcaggctcctgggagatcttctagcctaccttctcatacagaggaggaaagcgagttccagaatgagctcctgaagccgtgtccttggcccttcccactaaaccagataagctctaatggtacagatgggctcagagtgagtgatgggaccttggtgggcttttggggtgaactgaccatcccagcttcagggagcttggtgaccctctaggtgataggacaccccacctgccgagacaggacacagctgaaggaatattctagacaccagagctaagagggcctgcagacacaccatgtacaggaggagttaaatggtggggaggtcaggatttgccacaacaggcctgtccatcttttcctgcaaataggagtgactggaggaaggatgcggatgtcacacagaaaatttgtgctgtcacatacttcctttcttctcacctaatacctcacatttagcagtgtctttggaataaaggcacttagtattagttgattttcagggactctgccttgatttgaccttggggaggttaagtgctgatttccaatgcttcctttattgcctgggtagggaggcagatgggcagaatagataaaactcttttgggtctgaattttcctggatctactgcattttgttcataaataatacattattgacattttcccctaagagctaccctatgtaccctctgattttggtctcagtgtgttgtgtccctgggatgcaggaactacaaagatgcttatgcccacttcacagaaaggaaaagggaggctggggagtttgacagaaacacacatgcttggggggcagagccagggctagagcctccgcctctcaacaccaaccaaatgctgaaacctcttcctcagtctgcagtctttgccccaggagaggcggaggtttcctctctctgctcccccacatcacccttaggaaagccttgtggtccagagcggcctagcagcggagggagggtttccaactctgaagaatgctgcttggcgagtcctgtttctgaaatggtctctttctttctacccactcaggaggaagagttcatcgattggtggagcaaattctttgcctccataggggagagggaaaagtgcggctcctacctggagaaggattttgacaccctgaaggtaaggcctctcttcagtctgacagtcggtgtgtgtgtgcgtactgggcagtgggagacacaacagaaagagagctcatgcagtagatgtatttgcatttgtctcctcattcggtgtctgagggtgatgaatgctgctagaccagctgggtgagaaagccacccaccgatttacagcccgaagcaagtgtgggctgggataaccaagacagtattcccaggagaatgctgaagaatatggaagtgtttagaggtgaaatgatctgtgttaacgtgccccagccccctaccccttcccaagatcagggtggccccctcaccgattttcaaaatagtcaacattattaatattgcatgacattgaaaacagttaaagcttggagatgggtacgcagggatttgttgtcctatcccatgtctttcagtgttatttgaacttttctatagtagaaaatttgtgttaaaataaaaagagagtcggtttgagaatgtactcctgacccctaactcctacaattgggccagaaaattacctacaaatctgaaaatatgggaaaccctgtttctgtggaaaaaaacagaaatgagtcagccaaattgtggtattttgaggaaattatacaaatataattatgctttgaaaaagtagactacttttaaagaagataatcagaggtgactcagaaattactccttaaaggagttgcatggtctcctggctagggttgccagttaaaattcaggatgcccagtcacatttgaatttcagatgaacaatgaatagttttttaatatcagcatgcatcaaatattgcacggggcatatttctttaaaaattattggttatgaaacaggaaaagttcccttatcccccttgcagggtgtgcagtgggggtgtggctggcttcttcagtgccctgctgctcacacctctaggggaacatgcagatgggcaggttgtggggctccaaccccacagcagtgtccagaggtgaatgtttacagctgaagccccagtggatgtgtgttacagaggactatttcagcttagccatctgtaggcggcttgtgttagctcaattagacccctgccttatcacaagcacagagggctttctgtatcccggggtttcttgccttggtgtactgaaagaattggatcgcacgtgggcttggagattgagtgcaaggttttactgggtggaagtagctctcagcagattggggagccagaagggagatggaatgggaaggtggttttcccctggagtcgcgctgctcagtggcctggactctcctcccaccaccaggaccaaactccacgttgttccgctggtcaatggcctgctggcctgctgaggcctgttggtgtgctcctacgccagtgggtccttctcgacatcccgccgcttgtgtgttcctctgcttgtgtgttcctctcgatgtccagcaacttgtgtttctgcccgctagggtcttgggggtttttataggcacagaatgggggtgtggcaggccaggatggtcttgggaaatgcagcatttgggcaagaaaacagaaatgcctgtcctccctaggcctgtggcacaggcccgggggatgaagccctcgccagggacaccgtcctcctctacccagcacttacctgaccccgttctgtatcagttatttatttgaaattcagatttaactggaaattgtgtattttcacttactaaatctggcaacactacttctggattataaatgggggagactctgtaccccgcaattacctcccaggcttggagaggagaaaatgagaggtgggcacaggctgttagacacataggaaaggccccaagagccctttggaggggactggatgagagagagttgaagcttgtcagggtagcaggtggcctgggctttcaggtgattcttttggcgcagagtctctgctaggcactctggagggcagtttcaccagtcagcaaaagttgtctctgctctatgggcctgcctggtgaattgtgcctggagacctggctgctcagagatgaggcacaggcagcagcagctgcgatcctcaggcagcaagttcctcctcgacttggtagttgggtgtgtgaggttgggcaaagagacagaactatttgtgtaccaggaagaaggtctgacacattaggtctggcatgtggtcctgtggccttgccaaaaagtcagacaacccaagcaagaatgaggactcctgccagggtggcccatggccctggcccctcgctgctccctcaggtgcggatgctgaattggcacccagccctcctgcttgacctctggaggaggtctctgacagcatccaagtgaaaataggctgtccaaagcaaaatgcattcaaactatttctggggggaaaactagacctggaaggaacgctggttctttaaagataagtaaatggaagaaaaccaccatcaccaacgtgggtctttgaaaaatagcctgccacattatggagagagtggagcacacagtgggtgcaggaaaacagattttagaaatcactagcatagggggacaaaacaactcctaatctaaatagaaaaataaaggaacaaaagacacaacaagaaagcattaaaaacagaaaccacagaaaatgcatagtaaaaaaagaacaaaacatcttaatgttcctaattaataaaaatggactaaacttccccattaagtgacaaggactcttagactatatcaaaagtcaaaattcattgtactgtctttaaaagacacatctaaaacaatacaacttagaatggctaaaaaataaagattttggaaaacaatattttagcaaacaaggtaagtgtaaaccaaaggaaaacagaatttaaagtgaagagcaaaggaaacaaaatagagagttttatataaataaaagatgtatatttcaatgaaaagactctcaaatatttatgcatagaatagtaaagcttagaaatacttaaagcaaaaatggataagaatgtataaactgatatctcacacttgataaaagcacaaaatgacagaaattaaagttgcagtggggatttcattacaccattctccttaactatcaagcagacaacaaatacataagaagataaaagatctgaataacaaggtaaatgttttttaagctacatgaaattaaagttatagctttaaaatagagaataaaaataataaaaaatggagaatacattttttcctgatgctcagcgaatacttacaaaatttgatcacatattagttttgtagtaagttaccaaaagcagaaatcatacaagacagattataatgcaataaaatgagaaattaataacaaaagtttaaacaaaaagttcaaccgcttagaaatttaaaaaatattttattgggacttccagtatgaacatggctgcataagtcagcatttttccccttttctcttggaaatcattcaaacccacaaaatccattttcagaaaagttggaaacaaacagaagccacagacttcaaaatatatgtaagggctgctcaaagacaactgaaattggttagaggccactcagcagtaagtgaagagaagatacatgcagaatgttgaaagatcagagtagtagcagatctcagaaagcctagcaaaaatatactttctaatggaagaatgttgataattatttaggacagataatggttacatgggggtttattatctattctctttacttttgtgtgtgtttgaaaattttcataatagtttcaaaatacagttcctgaaagtgaggtttcaccatgaaatataaatgttacatcctttgtttacaaccgtggatacggaaactttggagacaggttgaagctgatgacagaagcctcttagacctgatttgattcagagaagcagaggtggagctacacaagaattacacaaatgagccatatttgcaggaagcagtctgcctctgtggtgggaacaaaattcagctcatttagtgagaaataattttttaaaacggtgtagcctgaattcaaaaatcctgcaaaaaagaaaagaaaatcaaaatgaaaacttatcagtagaagaggacatatacctacttgaaaaattttgccaaggagcagatgagatgaaatgctttgctatgaactttttagaaatggggcagtcagaatgcaaagcaaaaatgaaagtagtcaagggctgataaaatgagtgataaactatgggctggcaggactcaggaaagaaagagatgaaaacgtgaagttggaaggagcacagggcagaagggccacatggaaaacacaaccaagggcacagaggacagaaactataaaagtaagcaaacgaaaatggaaataatgaaaaagttataaaggaacaaagagaaaatgacagatatagacgtcagggaaaggaaacctaacatttgcataattggagtctccaaggaagacaaccaaaatagtaaaaaaaattacagaaaaaaccataatggtttaataaaaccttacggaaatgaaagaatagttgaacatacatattgaaaaagttcatggtgtgtcaggaaaaactgacaaagattggtcaatctgagacatattctaatataattactgtactttagagataaagaaataattctttgggtagtcatacctcctccccacctcttgaaaagaaaaaagcaatattaagtcatttaaaataggaactaaatcaagatggcttccattttttcgtaacagcattccatatccaaagacaataacacactgatataagatcatcaaagaaagacagggtgacctgaggattatatgttcagccaagctcccctccaagcataaaggctacagataaccatttgtacatattcaggaactggagtaatgtgattccaatgagcctgtcttgaaggaactcctaggggattaacttcagctaacctgggaagttatctggagaaaccacaacagaaggactggttgtagttcgaggctgtagtcagctatgattgcaccactgcactctagcctggataatagagcaagactttgtctccaaaaaaaaaaaaaaaaaaaaagtgaatatggtcatattttaccttagactcaaaatgaaaacaaatggaagggttaaggtaataggtaagaatgtaaatatcatatatactgaaaatgtagagatggtaaaactgacaaaaattaggtggagaaggacaaaagagtatggaatatagagtaaggacaatgattgacatatgataaaataaatacagtggacagatattatttgaaattggcaagtcacataataagcatagaagcaagatacaagcaaacagtacaaaggtaaatgttaaggaagatattcttgtctaaaactgggtgatagggagaaggagggagataaaattggattattttattattgctacagtagggaccccataaatactatgcctaaagacatagaggactaagtattatcagaatatataaatgtatataaatactagaacagaagctgagatcattccagctatcagaactgtcacatgcaccactcccatccgccccacacacagaaagtggaccgtgcaaagattaaaaaaaaagaacctatgaaatgaggaaatgtgatataaatacattacatgactatataattaaacaagtaaaaccaagaccaaacatatctgtcttgtcaatacatgttacatcagtcacttactaattacaaaatttaaatcagatctcagagcaaaatctaactctcaaatgaaaagattgataaagtttgaaaataagattaagaaaatgtgtgccaggcaaatgcaaattaaatgacagcagaagtcatcatcttaatattagatgagagggtattcaggttcctaaaattaaatgagacaaaggatgacactttataatgctaaatggtacaattccaagatatgacacttatgagaatatctatgtgctaaatactacaacatcaatacttacaaaacacaacttacaggagatatgagaagcaatggaaacacactggttggtagggggagatttaattcccttctctcagttcatgtcagatcaaggagacaaaaatgtcagaggaggccaagtgtggtggctcaagcctgtaatctcagcactttgggaggccgaagcaggcagatcacttgaagtcaggagttcaagaccagcctggtcaatacagcgaaactctgtctctacaaaaaatacaaaaattagtcaggcgtggtggcgtgcacctgaaattctagctactcaggaggctgagacaggagaatcgcttgaacctgggaggtggacattgcagtgagccaagatggtgccactgcactccagcctgggtgacagagcaagattccatctcaaaaataaataaataaataaaataaaaaataaaaggtcagaggatgtagaaggcttggcatgattagtaacctgatttaacccagtagcctgaaaataaagactacacgtgtggcacttttactacaattgaccatgtaacaggccatgaagaaaactttaataaatttcagaaagtgacaataccaagaaaacattttctgattgtaatgcaataaaattagaaatttgtaacaagatcaaaagcccaaaaggcctcttctacctggaaaattaaaaaaccctctattttaacaattcttgggtgaaggagaaaatactaacagaaagcacagaacatctaggaaacagtgctaaaacactacatattagaacttactggttatagttaaagcagcgttcagagggaatttgtggccttaagaaattatgttaattacaaaaaagaaaactaattaagtatctaactctgggatcaaataataaagataaaactgtaattacagaatgccgggaaaatgaaaatgaaaacatgtatcaaaacaaatgaggcaatgccaagacattagtgagcagaggcaatttcatatgagtaactattttcattatctggaaaaagggagtaagtaaagcttcaattcaagaagctagaataatgataatgaaaagcccttaaaacagcaggacaaaaaaagagaaaaggaaaaggaaaagcagaaaaaattagaaaagagaaaattatagaattgaattgaaaaaaatcaaataattggcactttgattggaatgaatcaactaaaatagataactcttcagctagtctactttagagaagtagagaaaaccaagccaaaatccgcaatgaaaacagggacataacagcagagataattgggagttaggaattttagaaaaattctaagtatatttctatgttaatagatttgaaaatgtccttaaaatgagataatgtgaaggaaaagagaaacagaactgtctcaagaagcagcaaaaaatatgaaagaaacaggaaaattatcaaagaattactttcaaagagagagctggagccagggaattataaagtgaatttcctaaattttcaaagaataaataattcctgtgctatatgtagtatttcacagcagagaaaatattaaaatgtagaaaacctcgatttttatagagctagaattaccttaccatcaaaatctgataaagttcagccatatgtataaatatcatctatgacatgaatatatatgaaaaatcttagagaaataatagcaaatgaaacctaactaatattaaaataatgtcatgataaccgaatttgcttcattccaggaatataaaaagttcaacattaggaaatcatgaacagtattcatcatatcagtaggtaacattaacaaagattatttcagttggtgctgaaaagcattcaataaagtttaatatctattgatgatttataagatcaagtaacatattggaaataggagtttccttaatgttaaaaagaacatctctcaagctaacagccaacatccaacttcatgacttcagaaggtttctttactgtagaaaatgaacttgtatttctcaagaatgttcctaagtgcatttgtctggggagagagtccatggcttattgactgtagattactgaagcactctgtgactcaatataggttaaggtactgagtgaaacactagggcagtcctttcacaaagacaagacaagactcactgtgatcacgttcatgttatcactaacattggtccatatcttctaaccatttcaatgtcaacaaaaagaaacgggtcgttcattttagaaaggagaagacaaaattatccctgtgtctgactgacttgcttaccacctgaagagaaccaactgaaaaattagtagaaccatcaggagaacccagtaagatggcagcaactatttagaaaatctagtggaagaaagattcacattcatagtaccaacaaaagaagcttcatgaggaataaactcaacaataaacacataggctctgtatgaagatgcctataaatagtaaaagtcttgtgtaagttaagaatcagatcatgttcctgtattaaaatgttaatactataaagataacaattcccctgttgaaaattagttttaagtttaatgcaagcctaacaaaaattccaaagaaacattttgttgagaatggaacttaatgttttaaaatttcatctggaagaacatcaggtaacgaaacaggttatgaagccacagtgattaaaacatggtattggtgaaaaaacgcacagatcaatagagcagagaagagatcacaaacaaacaaaaggaggcgtgagcatttggcatatgacacaagtcatgggaaagggagaagaagtttaaacaaatatgatgtttagataattgcctaaccatttagcaaaaaataaattaaattcttgcctcacgctgggtaccaaattgaattgagtgttgaataatcttgctatgaagacattgtaagtataatttgagaggcagacactataaagaaaaagatctttagatgagatgatctagaaatttctggtatggctaaaatgcaaatcaaaatcacaatgagataccatctcacaccagttagaatggcgatcattaaaaagtcaggaaacaacaggtgctggagagaatgtggagaaataggaacacttttacactgttggtgggactgtaaactagatcaaccattgtggaagtcagtgtggtgattcctcagggatctagaactagaaataccatttgacccagccatctcattactgggtatatacccaaaggattataaaacatgctgctataaagacacatgcacacgtatgtttattgcggcactattcacaatagcaaagacttggaaccaacccaaatgtccaacaatgatagactggattaagaaaatgtggcacatatacaccatggaatactatgcagccataaagaatgatgagttcatgtcctttgtaggcacatggatgaagctggaaaccatcattctcagcaaactatcgcaaggacaaaaaaccaaacaccgcatgttctcactcataggtgggaattgaacaatgagatcacatggacacaggaaggggaacatcacactctggggcctgttgtggggtggggggaggggggagggatagcattaggagatacacctaatgttaaatgaagagttaatgggtgcagcacaccaacatggcacatgtatacatatgtaacagacctgcacattgtgcacatgtaccctaaaacttaaagtataataaaaaaataaaattaaaaaataataataataaaaaaaatttctgatatggctaaaaattgtaaatataaacataagataatcaaacgtaaccataaatataacataaacacaaacataaacataccataaataaaaatatcataaatataacataaacataactgaaaggcaagtgacagactgggacaaacatttgatagaccaaagtttaatatcctttatataccaagaagtctctcaaatcaccacagaacagaaaacaaacaccaacagatggaaaatgtacaaatgacaaggatgagcagaagaaatacaaatggctgataaacccgtgcaagtttctctattattattatctctattaaataaatgcaatttaaaattcagcataccatcttctatctatcaaattaacaaagctaaaaatgggtgaaagtgtacagtgatggtgaaaggctgggagtgtgggcacacttgaacactgtagataggagtatataaatccatacaatttttccagagagcaatttgtgcacatcagaggtcttaaaatgtgcatactccttgtccaggaattctttttctgggagcttataataaagatgaatttaaacaagtgcacaaaacacttggataggagattttaaaactcccacaccgtataagtggtttaaaaaaataatgttgatggctgggtctggtggctcatgccagtaatccctgcactttgggaggcggaggtgggaggattgcttgaggccaggagttggagaccagcctaggcaacatagcgagactccatctctacagaaaataaaaataataatattgaaaaaccgcaaaactaaatgttcatcatatcttgtgatacatttataaaattgaatatcatattgccattaggaaggaagagttttatagaagtatattttttgaccttgcaaagattttcatggtacatcattaggttaaaaaacaagttacaggccaggcacagtggctcacacctgtaatcccagcactttgggaggatgaagtgggaggattgcttgagtccaggagtttgagaccaacctgggcaacatggccagaactcatctctacaaaaataaaataaaataaaaaatataaaaattagctcagtgtggtggcacgcctgtactcccagctacaggaggctaaggtggggggatcatttgagcccaggagttcaaggctgcagtgagccatgattgcaccactgcactccaccctgggtgacagagtgagacttctcccctcacttgcaccccccatccacaaaacaagttacaagtttgtatcttttgagtccataattttggttaaaaaattatatatataaagaaaatattcaaaaggacatataccaaatgctgatcaaataactagttatttttgagaattagaatttaagacaatattaatttttaaaaatatttgcttatatttttctaaattttaataatgaacctgtgtcacttgcataattaaatatttattagaaaagatagaacttgaccttcaaggaagagacagaatttgagctgggcctaaatgagaaataatatttggaaagatgatttcagatatgacgaatttagcatgtatgttaacctgtttaatgttactgtttattaggtacattttatcagcataataaaaaacagcttgctgctttattaaatcctaagcaattctaaagcactgctttaacaaataataatcattggctgtttgagaagagacaagtaaatgaattgagctaacaagtttaaagtgatgctccaaagatacacttggattgatatttgataccattgtcattggatatcctgtatgtgaacatttttacttgaaatgctgacctgttaattttccagacatctatcacagtcttcaaataaaatgtcggtccaccctttgctcattcataatcttgttcttttaaaaaatgtactgcccatgtctctgatgactctcaggtacttacaatattttattgaccagaaaaccctattccctaacggagctgaacaaatatctttccttttgctcccttcccctggaattttctgtccatctcctcctctgttcctttctggctccctctgtgacctctccatctctccaaccctgccctcttctttgccttcattcctttattttgtttttggtcactttccctccttttcttcttctctcttccttctctctctttattcactctcacactgtcatgtttcccctccttctcttgtttcctttcctttgctgttgttctactttctttctgtctcttgtcccctcctctaatccccatgtgtggcaggtctatgacacacagctggagaatgtggaggcctttgagggcctgtctgacttttgtaacaccttcaagctgtaccggggcaagacgcaggaggagacagaagatccatctgtgattggtgaatttaaggtaaatcctcgaagacgtccctaacccaggtgggcctaagactgtggtgttggagcaataagtgaaggggaggggtcgtacctacactggtgaccctggtgctgatgttggtgaccacatgggtaatggaggtggtgatggtgatgccgctgacgcagaatctgactggtgatgggatggtgttgggcttggtgatctcagtggtggtgactctggtagagatgagagtggtggtcatgatggtgattgtgtcagtgacaattgtatttgtttttagtctgttttcatgctgctgataaagacacattcaagactgggaagaaaaagaggtttaattgaacttagagttccacatggctggcaaggcctcagaatcatggcgggaggggaaaggcagttcttatatggtggcagcaagagaaaatgaggaagaagcaaaagcagaatcccctgataaacccatcagatcttgtgagacttattcaccaccacgagaatagcacgagaaagactggcccccatgattcagttacctcctcctgggtccctcccccaacacgtgggaattctgggagatacaattggagttgagatttgagtgggaatgcagccaaaccatatcattctgcccctggcccctccaaatctcatgttctcacatttcaaaaccaattatgccttccttagagtcccccaaagttaactcatttcagcattaacccaaaagtccacagtccaaagtctcatctgagacaaggcatagtcccttccacctatgagcctgtaatatcaaaagtaaggtagttacttcctagatacaatgggggtgcaggtattgggtaaatacagccattccaaatgggagaaattggccaaaaccaaaaggttacagggctcatgcaagtctgaaatccagtgggacagtcatattttaaagctccaaaatgatctcctttgactccaggtctcacatctaggtcatgctgacgcaaaaggtaggttcccatggtcttgggcagctctgcctctgtggctttgcagggtacaggctccctcctggctgctttcacaggctggcgttgagtgtctgaggcttttccaggttcacggtacaagctgttggtggatttaccattctagggtctggaggaaggtggccctcttctcacagctctactagcagtgccccagatgtggggcatcagagcccccacatttcccttctgcattgccctagcagaggttctccataagggccccacccctgcagcaaacttttgcctgggcatccaggtgtttccatacctcttctgaaatctgggtggaggttcccaaacctcagttcttgacttccgtgcacccacaggctcaataccacgtggaagctgccaaggcttggggattccaccctgtgaagccacagcccaagctgtacattggcccctttcagccacggttggagcagctgggacacagagcaccaagtccctgggctgcacatagcacagggaccctgggcccggcccacaaaaccactttttcctcctgggcttctgggcctgtgatgggaggggctgctgtgaagatctctgatatggcctggagacattttccccatggtcttggggattaacattaggctccttgctacttatgcaaatttctgcagctggcttgaatttcttctcaaaaaatgggtttttcttttcttctgcatcatcaggctgcacattttctgaacttttatgctctgtttcccttttaaaacagaatgcttttaacagcacccaagtcaacttttgaatgctttgctgcttagaaatttcttctgccagataccctaaatcgtctctctccagttcaaagctccacagatttctagggcagaggcaagatgccaccagtctctttgctaaaacataacaagagtcacctttgctccagttcccaacaagttccccatctctatctgagaccacctcagcctggattttattgtccatattgctatcagcattttgggcaaagccattaaacaagtctttaggaagttccatagttttccacgttttcccatcttattctgagccctccaaactgttccaacctctgcctgttagccagttccaaagtcgcttccacatttttgggtatcttttcatcaacaccccactcctggtaccaatttactgtattattctgttttcacactgctgatgaagacatacccaagacttggaagaaaaagaggtttaattgaacttacagttccacatggctggcaaggcctcagaatcatggcaggaggtgaaaggcagttcttacatggtagtggcaagagaaaaggaggaggaagcaaaagcagaaacacctgataaacccaacagatctcatgatacttatttactatcacgagaatagcatgggaaagactggcccccatgattcaattatctcctcctgggtccctcccacaacatgtgggaattctgggagatacaattcaagttgagatttgggtggggacacagccaaaccatatcaacaatgatgataaaaatgaaaattaacccttccttcttttcagggcctcttcaaaatttatcccctcccagaagacccagccatccccatgcccccaagacagttccaccagctggccgcccagggaccccaggagtgcttggtccgtatctacattgtccgagcatttggcctgcagcccaaggaccccaatggaaaggtaactttcctagagccctcacctcccccagagtagcaggctcaggtacaagtggcctatagaacctggacacaaactctgcctcagggagttcatagtaggttgggaaacagacaaacacacaaaactgagaggtgcctggatggagttgtgttaaggaccaagtgctctagaaggtcagggaaggccagtgtcagtacaggactttgggaaaatggggaaggcttcctggaaggaataggactcttaggatagatgagattttgataggctgggagggagaagaaaatagtgttttaagaggggccaaaagcataggcaaaggtttgaaagaaaattgcttaatgtgtgtctagaacaagaataaagcagaaagataagtaaggctgagggtataggttgggactctcaatggttaatggggaggagtgatgggggaaaggagcagcgttagtgactgctatgcctagtcatggcagagtcccaggtaaaagggaatgctggtaacactcacccggtctttatttaaaattttgatattttgttcatcatggactattgacactgattttaatttttaaaatatttcattaaagtactgtttatcttaataactattttggcccttccttacattttgtgcccaagataagtgcgtgagctgtctccctctagtcattgcctgagatggagaggggagatttgaaggaggaaaggagtctggagttatggggaggtgacagaggtgggaggcagagtaatgttgggaagagaaagaaagaggaaagaagagaggcaggggtggggcctgatttgcctttacaggcatgaggctagggtcccctcttgtctcctgaggcaggtttaggcccagcatgtgtccttcaggtggtgggcggaggcctggtatcccaccctgtagcctcacctttcaagggacagaatggagcagttctcagcctaggcaccactgacggcctccaaggtgtggtcatggccagtgggttggtttatatgcttgaagccttcctgatgctagactaaccctgggcactctgcagccccagctgctgggtcgctggctgaggggtgctgctgcttccaggaagcatggagggagacctccctgggctagcctaggctgacataggctgaccacccctctctcattccatatgcttaagcagaggtcacagagaggaccccagcctggtctcgtcatgtgtgtaatgcagactgttgtgtttctgataagggcctggcctctcccaatggagcagtagattgggagtgtgaaggactcaggtgccccattcccacggctggagccaagaccagaagcccatgtcagggtccaagtggagtggtgtggtgtgtgggagggggccctgtcttggcaggacacagcccacatctcaacttcctgatggctgctccctcatcccatccagaggcaaggcactcatgaagcctcaaagacaggtttggaaagtgttttcacagaagtgttttgtctcctcctccagtgtgatccttacatcaagatctccatagggaagaaatcagtgagtgaccaggataactacatcccctgcacgctggagcccgtatttggaaagtaaattggggcatcttgggtcttggggtggaggagccagacaggataacccacagtctagtgggggagatgtgactggcactgtgaagtccgtatctcttggagcaaaactgtattccttaaatcttgcatgtctatgggggcatagcctcagttagcccttctttagctgctaaagacttgatcccaacagaagctcctagttaaatgctaaacaattacgtctaagatcagaaatctacatggcttgagctcaggagtttgagaccagtctgggcaacatagcaagaccccatctctacaaaaaataaaaaacttagccaggcatggtagtgcatgcctgtggttccagatacttgggaggctgaggtgggaggatcccttgagcctaggagtttgagcttacagtgatctgtgatcaaactactgcactccagcctgggtgacagagcaaaaccctgtctcaaaaaaaaaaaaaaaaaaaaagaaagaaaaagtagaaatctgtgtgtaagctcagaagatgcatttgctaattcttttttttttttaagataaacttttactttggaataattttagatttactaaacagttacagagacagtgcataatttccacttactcaatttcccccactggtaaccccttactcaatttcccccactggtatcatcttacctaaccatgggacatttgtcaaaatgaagaaatcatcattggtgcattacgtttaaccaaactagacttttttttaaaggatttcatgttttcccactaatgtcctcttactaatgtctcaggatccaatctgttatacgacattgcatttagtaattaattctctgtaagtgtcccacatgtgtttgtagcaagagctagaggaagaatgtagacccaagatagtaaaatgattcctgaaatctgagaacaaggaaaggaagaatcaatgcccattgcatgggagtaattcctaggcatcctgaattgctgtttggatgtgagcttgtttaggccagagaggggaggatgcagagggagggtggcagctatttctctcgcacctgcagaagacacctactgttccgatgtcatcaagtcacatattgcacttataaaccggggtctgttgagttagttgtggtcactcaccctgcagtgaggacccagtctccttggggaaatgcagcttttgaaggtgaaccagccctggccagtgatgagctcccaccaagcagggattggagggaagtggtaggtgggagagaggaactctgtatgagttccaggggctggcgagctccaggggctggcgcaggacctcaggctaatgctgatggggcagtgggcagggcctgttccacagtgggtgggcgtgtgtcaggactcaggggagataggggagccagtgcaggaacacacccctcccatgcctgtttccccatctccccccaatcctgggcaagctggtctgcctggtgctttaagcctccttcagatcacaacagaaacccttccattctataacccatgtgtcagacgaacacaacgcatgaggtggtttttgtcaccatgtattccatggcgttaccttctcctttcccctgaggaaactgacaggcaggtgacttttctgctcacattgagctcagccactttaactcacgaacccagtctcaggccataacccactgcccatttgtatggaatcccgagctccctgatggctctaggggagtgtgtcccctctttggatgcagttgtgtgtgtatatgtgtgtatgtatgtgtgtgtatgtgtgtatatgtgcacatatgtgcgtgcgtgtgtatgtatttgtgtgtatgtgtgtgtatatgtgtatgtgtgtctgtgttcgtgtgtctgtgtggtgtgtgtatatatgtgtgcatgtgtatttgtgtgtatacatgtgtgtaggtgtatgcgtctgtgtgtgtctgtgtgtctgtgtggcatgtgtgtattttgtgtgtatgtgtctctgtgtccatgtgtccgtgtatgtgtgtggtgtgtgtatatgtatgtgtgttgtatgtatgtgtgtgtatgtgtatttgtatatgtgtgcgtgtatgtgcatgtgtatttgtatgtgtgtgtgtatgtgtgtttgtgtctgtgtgtctgtgtgtggtgtgtgtatatgtgcatttgtgtatatgtgtgtgtatgtgtgtgtgtctgtgtccatgtatgtgtgtgtgtgtacgtgagtacatttgtgtgcctgtgtgtgtatatgtgtgcacgtatgtgcatgtgtgtgtgtgtgcatatttgtgtgtgtatgtctgtgtccatgtgtctgcatatgtgtgtggtgtgtgtatatttgtgtatgtttacgtgtgtgtgtgtgtgtgcgcgcacgcgcgtggtgtagggaaggaagggccctgccttcctcccttcctggtccagtgtttctcccttcctgctctggctgacctctgaggttctgactcctgcagtgtctgggctggggagagggcccgtctcatgtgcccaccaccgctgtcatccgggtactctctggaccacggatgttgaaagccgacttattttcctgtgggtgctttccagaggttcctcagagagccccccgtgagccctcccactgcactttctgggatatggcagatgctgcgtccctttagctgctgtccccagcccctggttctcagatggtcaactccacaatctctcgctgctacaaccctctgggggtctcacagggcaggattcagagcagttccagtctggcctcagagtggtttcttctcctcccaggaagtccttgtgttccttgcccaggcatgggccagagtgcagctcctcccaaatgtggcccctgccctccttctccatgccacaagttgcttaagtttccctgagcatgcaccaggtgccaggcttgtgtctctcacctgcagggagctcattttagggggagaagggagaatacctctccctttgatgcacatggtagatggagttctcagatacagcaagagctctcgccagagaaatcttttcacaaattctccctccatcccatcccagaagtggatgtgaagagtccagaaagcaggtcccaggcctggagtttccagtcatcggtaaattccaaagctctggccccttgctctggagtaccagtcgtcggtaaattggagtcccccaatttaccgggagtcctccctggactggaggtaccagtcgtcggtaaattccaaagctctggcccctggctctggagtttcacatctcttgcatctgttgtctcctggtgtcgtggtcaaagcttcagttttaatgtgcatttccaattcattctttcggtctgtggtccatcaggcaggcacttgccttatgcccagcacagtttatttgggaaagtcctgtcccccttccccctacacacacactcaggcccagtacagcagtgctgtgggtggttgggcctgtaagatctgtagggggcccaaggaaagaagactccctggggtagtttcgagctcttgtcctgccctgcctgtcccttgggtgccccgtgttggctgacatcgggaatctgcccctcctgcaggatgttcgagctgacctgcactctgcctctggagaaggacctaaagatcactctctatgactatgacctcctctccaaggacgaaaagatcggtgagacggtcgtcgacctggagaacaggctgctgtccaagtttggggctcgctgtggactcccacagacctactgtgtgtacgtggatgggggctggctgcctgcttctctgacaacacaccacccctgtcttctctgacaacacaccaccactgagcacttactgtgtgccagccctgggcttagcacttcctaggcattctctcattgagtccaatgggagtcctatccccactccacagatgaagaaactgaagcccagagatgttattgcttgtaagtggtggaattaggatttgaaccaagaacctggctcatcacattgttataatccagttatctgtaatgcacatagaaggcctagagagggctaggtacctggaaagggagagagggaaggaaggcaggaaagaagcaggggaaacagatgagaggacatgtgtgctgcaactgggcccgaaggggaattttgtgatggtttatgtcaggggaatgcatgtgaggactgcacccctcttcccaccatctcaagtcttctctgggtctgattatctaactctggaaattgaaaacatttaagttgcaattccgtacttaaatgagtccttttctctctgagcctccatttctccatctgtaaaatggggatgcccagtcatggtgagcaatcagatgggacacccactgtaaaagcaaggagtgggcaatgctgtacatgggggtacaccagtccctgcatgcccctctaccctcatgagtgtccttgaagcatctcatctatgtcttgtgcttgctcctcagctctggaccgaaccagtggcgggaccagctccgcccctcccagctcctccacctcttctgccagcagcatagagtcaaggcacctgtgtaccggacagaccgtgtaatgtttcaggataaagaatattccattgaagagataggtgagctgccacatgaccccaaaccatggtgggctctcgctgtatccctccctctctcatcagaccctctgctaccataaaagacccaagcggacataacccacagcagcaggctgtgggtctctccagggcagcacagatgggctccacttgcacttggtactttgaggatcagtactgacctgtgatgccactgtgaaaattagaggtcagggcacagccagggtcagagtgcagtccaaggccaggttggggcccatccgagggcaagatcagaggtgagtctgaagccagtgtcagggtcagagttaggctcagtctctttctggcattggctggtctgactctggttggagtttggggtacagtccacttctcagaaacagttttctacttgaattgcaccagcctggcagcttgaccctgatggtatcttccaagctccccactgacagcccatgcatctaaaggatcccaaggcaggcaggccttgtagtgcccccagtcctgcccagggtcctgcccagctctcctggctgagaatcccgccacatgctctccgtgtgtctgagatgcccgcaggcctgcatcacccactcagagcagctcagactccccagaggtgtttacaggcccagctggccccttgcctcctggttgcttcagagatgtttgatgtcagagctggtgccaaggttataaaagggaaatgatggctttgatgcccccatcccccaccccctcctccttctcattctgttttcctgactctcccaggtcatggctgagccaggctcggccataaggcgcccccagccctgccccccttcattcccttttcccatagaatgagcatctgttttcgggggagtctcatttccttctactagtctgtgagcaactttagcacagggccatggctcatggtcataaagtcataggaaacaaaagccagaaagctagagatggtgaggtccaacatctgcctgcttttacagatgaggctggtaagaccaagagtggtgaacgacctgcccaacgtcacccaaccagctaggggcagagccaggttcctggccctgtgtgccttctgaggtgcatgcctcttcctttgaggcccctactgaaatgggcagggcaggtctgatgggtgaacacatgtgtgtgtacatataggtgtgcatgagcacacctgggtacatgtacagatgtgtgtgtccaccatcagctcccaaagccaaggcctttgacatagtgggctccaagttcatgttgttggatggttggccaggcttctctgggtcaggaataccccatgtcttctccccacctgtagcaccagtttttgacccattccctagcagggaggagctgtacctgggacgcacctggggacaggcacctaggttcatgcctagtcacgcacctttcctaagtgagcatgtgatctcagctgctctgctgctagttgtgtggcttctctgtgcctcagatttctcttctataaaatggggataataacagcactcagcttctaggatcctcatgaagactaaatatgttaatagcttgaagaacagtgtgtggcacgtggttcctgctctggaagtgtttgctgttattgctattattttagctactgctaatagtagaacaacttaagtgaacgagagcataatactaacagcactaagatgccaaatctaggagtaaaggttgctgaggcttagagttgggagcagtcagggagagcttcctggaagaagtaggctttggagacaggaggatttgtatggtggaaaataggaataaaaactatagaacaggcttggtagaaatgatggcaatggggaatctggattttaagcctggagctagtggacagcaagatttcccctatcaaaagtgagacatgaggaccagaaaaagtgcatctgtgctgggggtgaggctgcgggggttagagcttcttatgactcttaggcagccctgctcagcctgttcactgggcagccccattatctctcgcttccccagctcctgcaacttttttgtcttctctctggggcagaggctggcaggatcccaaacccacacctgggcccagtggaggagcgtctggctctgcatgtgcttcagcagcagggcctggtcccggagcacgtggagtcacggcccctctacagccccctgcagccagacatcgagcaggtaggaccttgacccttgggtcccagagtcctcgaactccagaaagccccaaccccagggacaacatggatatcccagaggagccagtgggtcccttgagatttggtcaatccttccttgacccatttcttcacagtctgagtgcggccatggttggcctgggaggggatctttaggtcctggcttcctctggctgcctccatccctcagggcctgcgaaacgaggctgagcttctcccctcacccctgtaggcctggcctccgacctctccttgtcatcctgaagcctctctgtttcagcctgacttcaggttggattcccccatccaaccactatctgtcagtgactcagtctcagatgcccggccctgtgctgggtggctgtggggtatgcagccagggtggccctggcatcctatgaccaaatgacaaagccacccacagagagcagtcctcagtgggaggggaatcctcccacgctgaagggcggggaccacagagacagcagccttgggatggtgacagggagggcttcctggaagaggtgagctcagagctgggttttggaagaggagaaggggagacaaggttataggcaaagagaaaggccaaagtgagccatgaggatgcctttgtgaatgccagaggacattacctctgttgtttggaactgagctctctctccacctaggtggtttggctaccggcctccccaaagtggcacaacaggtgtggaaacttcagctctttcatcttctagttctgtgaccctgcagaagtgacttaattgaattacttcaattcctgctccttctgctctaagatgagacaaattcacacctcgcttgcagagagggaggaggataaggggtgggcagggagagtgatgtcctgccatggaagccttctgagccctccataactgaacggtgctctttgacacgccacgactgtgcacatgccattcccctggctgccaagactcagctcagccaccaccatctctgagaagcccaccctgacccttgacccccaggcacaggcccaagtcagaggcctgtggggcagtggtcacctctgcggttgaccctgtagtcccctgtttagggcagtgaggctttctctggaagggcctgggtttctctgttctgtgccctcagcatctggcccagagcaggtgcttggtaacagctggttaaatgagaagggtggggagagaacggaccctgtctccgcaggggaagctgcagatgtgggtcgacctatttccgaaggccctggggcggcctggacctcccttcaacatcaccccacggagagccagaaggtgacttgcccagccacaggctctgagctgggctgaggggtgggggcgttgcagcctgctgtgggcgggactaggcggttgctcttttctgccgggcttcaggctatttgggccatggaatacagttctcgtttgggcctgggccagtgtccagccaggcaggcatcgagtcctcttggaccagtctgcttcttggcttcttggcttcttaaggccttcccatcctttggtaggaaatctaggtggattagagtgatacctttccccaggtttttcctgcgttgtattatctggaataccagagatgtgatcctggatgacctgagcctcacgggggagaagatgagcgacatttatgtgaaagggtagggagccagcgtcctcttgcctgtccagcttcccgcagctcccgtgctccctctgggttgtgcacagcacggggggctctggctcagggaagggaagaacaaacaaacttccaacgagggctcctgggggtggtccctgcctttggggaaatcgctctcccaccagatttctttttctgcactgaactttgggttgaacttacaagtttagtggctgggaagttagaatgttttcaaatttatggcacattttgtacatcgtgccgatttcctgggaattctttttgcgataagctcatttaccttcttaactccttgtctgcctaagttgacgatgtatatactgtgttggaaatcttaatgagaactattctctaaaaacatgtatgtctagttggatgattggctttgaagaacacaagcaaaagacagacgtgcattatcgttccctgggaggtgaaggcaacttcaactggaggttcattttccccttcgactacctgccagctgagcaagtctgtaccattgccaagaaggtcagtgtccttccgattccctgtggtgccagcaccagggcttctaaagttagcctgacctgaccaccacgtccctgcctggcaactgtcacaatctcactgctgccccaccatgttggagctaccactgccatctccacatggccaccacctccactgtcccagcactgccagtgtcaccaccactgctgtctcagcattgtgtgatggcctctgtcccatcacagccaatgtcaccgtggctgctgttccatcactactggtgttatcacaactgttgcctcctcactgccaaatgtcaccaccactgttctgtcattcatggcactaccgtggtcccacccctgctgtcattacccccaaagccacctccaccatctctgcatccaccccttttccactctcttccaccatctttcccatccccagccctgccgccaccccatggccacctcatgatcacacagtgccatatccatcatttgcagctaaatccagatcccaaagtcactgcctccctccctacctcagacaagttaagcagcaggaaggaccatggggtctgagtgggtagagtagggacacccagcatggccttcaaaagggcagtggggcagaccccatgggggagcttcccaagaaggccagtctggcctatagatcatggtgtccacaggattgggagttgcttggctaagtctttctcatatcccattttccacatctgtgcctatggtcaccgtccaagctaggtcacagtccaagtgtgcctgcaaggcccacagccatcaccctcctctctccactcccacctctcactacaggccaaaggcacctagggagacctggcttgcatcagccagaggggaggctggatttggggacctcggtctctgtgtctcagcatctgctagtttaggtctcatctggggcgtcaactttttacccctgaactaggcagaactcgaggacagccagcctcttcctggtaggaccaggcctgccctcagagagcagcccccagagcacagaatgggtgctgagggcagtggagacttcagggctatgctggttggaggcagaggggtctctgctgtagcttctggccatccttgtcccacccggcattaaattccaccctgaggtgctctccaactcaagggggtaaatgcctctctggcatctagattctgctggcccgatttccttccagaggtggctcaaggctttaagcctcaaagctcctatgactccttgtctcctgaaaggaaggggatatatgacgcgttccagtgcctgcattttcttgattctcttcattacatcccctctgcatggcccttcccagcctaacatgcaggatcatctgcacattagagaaagcaaaatgttccgcggaacattctgaaaccatgaaacaaaagaaaacatggattcaacagggttaagtggatccctttaccgagccattgctgtggagtgactggcagaaagcagaattgagcaacagggttctgggaggtcaaggaaagcatgggccgtttgcaggttgagcctcatttgctgctgttcagtgtgcttccctgacatgagcctgtttccatcagaaagccaaggttgcatctgccccaagacacagcactgccccagccagctctgctgcagacagagggagagggggcctgggagtggagagggagggctgcgccccccgtggcacccccagggctcacctacaagggctggagactgagaccgagaggaatgggaggtgggacagccccttcctcatgacaggtggagatgtggattaggagtggctgttttgtctctgaagtaagaggagagatgatctggtactggggcaggtgacttgagaccagtggaaaaggctggaaagagctgctatgagtgacagtgagggagggacacagagagatggggagggaatgtgactggcagcacagagagggttacccggcagttctggggacccagttgtggttgctgattaagaatttggggtggctccattctggcaatgttgtggttttgtctctgcatcatagggcctggtcaggaggaaggaagaaggggagagtggggccaacccgtgggcgagttccagaggaagacaggggtcgaggatatggaagggactgcctgatggccaagagggtcttggtcagacttgggagaatgagaagcccacaggggagcaggggtggcgaggaggaagagaggtcagagagtggaaggagaggctcactgggagggaaggccagaggggaagggacgttctccgtgatgccagactctggggagaaggtggctggaaggaggggcggagaaggtcagaagaggaggctgagaaacagaaacagaggccacgtggctctgaagtcaaccagaggtgggagacagaaactggctcggccgaaggcggagacagaaactggcttggccgaaggcagagccagagggtccctcttggagtgaagggaccctgggaggcaggcagagcagtggccacagtggggcaccagttagctgggttgggctgaaggatcgagtctggatgggttcgtgcaggggcactgcacagcctctgggctccctgggcctgccacggagccagccctctgccgtggggttcagggcctctggcaggcaggccctccagggaccccattaaccagacgagactgtcgtaaagtacaaggtctcctttcatccggcggctttgaaccaccactggttgccccggccaggctccccacctggagcccagcacaccctgcacgtcaggcacccaccctgcaaataaacagctagtaaaagcgcccaggccaggagcataatgagcgcctgggacctgggggggttcattccccaggctggagccccagcccagctgctcccaccaggggccgtttgaacctctggctcattaccgagcccataaaccaagctggccagaggaatggaggctgctggcgggccatgcaggcgggcctgcggagctggccataaaagctcgccagaggagggaggcacctgcagaagggctggggcccggaaaaggggggaggcaccagacagagggctggaggtgaggggccagctggagacctgagccccttccccaacccaggcagcagtccaggccgtggctgggtgctttgcacggggactagtcctcacggggcaggggtcatggtcttcggttcgggagctcactgggatttccgtggccaacctctgaggctggggtggccacacagcaggccctggctggacagcaagggtgggtttaccaggcatttggtggagcttttcccctgcagagttgggtccaggcccttgctctgacccggcactcaggacttggcacccaccatctgcagggtggtcacactgtttcctgtccttgccactcacccaggggagagttatagtgagaaaacagagaacaagactgcgctggaaagccctagtgacagtgctgtgggttgagtgtggctggactgaggggtgctccccggcctccgcatgtgcagtcccacaccgctcagttgctccatgaagcctcagtgggaggaagcccaagatgaccttgttccaggcgagctggtctgagggaggtggggtggggagagaagggcccctcctctcctttcagcaggagacggaacttcccagcacttcaggctttggctttgccctgggtcaagctcttggagtgaagttgggtggggtggagagggaggagctggggtctagattccagtgccagctccttacagcagcgtgctgggagatccttctatgacagccagggtagggtggggtccctcagggtctcagttaccccaccctgaccctgagatgccaggtacagagcaaggtttaaggtagagagcaggactctggaacccagctgccagggtttgagtccagcttgccacttcctagctatgtggtcttggacaaattacttgctttggtctcctccactgtaaagatagtatctcctttacaggtggttggaaggataaatgagttcatagcagtagagggccaacgcataggaagcactatattaatgttattattattagtggtcagacctcaggcacattcctttaacttctccaagcctcaccttcatcatctgtaaaatgggagtgataaccttgacttacagagttgggaggattaatggagccatcttatgtgaactgagcctgcacggtgcccttttgggcccttgaacactgccttctgggatctgtccttcccagtcttcccacaggacctggctctggcaggtcccttggggacatcctactcctctgcctcctccaggcagccttccaggctggaagggaacactgcctctctctaaccttgcttccttgcatccttctctgttcctcttccgggtcaggatgccttctggaggctggacaagactgagagcaaaatcccagcacgagtggtgttccagatctgggacaatgacaagttctcctttgatgattttctgggtaagcgctattgctagaatcccattctgcacatgggggctgccccagaacccacactgtgtgtttatgccactgttggacccttggggaagcctagcaggaggagtgatcccactttctgctttcagggagctcagggtcatgtgtccccagtgttaagtgaggtgtatgacacacagcagtgtcagagtgattggtggccactgagggtgggcctgtcagtagaggtggcactgaacactgggccatgttggatgatgggactcagatatgtaagtaagcgagggacgcaagtgtgtgctgcctgtcgccagctgtctggcctcacatttgacacagactgagccctgtgagtgagggtctcaagtcagtcttcatccttgtgcctgtgtgaccgactgagtgaacaaacccaggctctatccccattacccccagacagggttctagtgggaagggctgtgatgaaatctgggactggggagcagggaggctgggttgaatggaaggtggtgatggtggccttgtagggttaggatatggggacaaggaggaagacattgtatggggcctgcacgctcatctgtgagagcagtgagttcaagatagccctgtcatggctataaaggttaactctggaaaatgtggtctatccatacaatgggagagtattcagccatgaaagcaatgaaatactgatacatactacactgtaggtgaacctgaaaacatgccaggtgaaagcagccagacacaaaaggtcaaatattatatggcttcatgtatatgaaatgtccataataggcaaatccatagagacggaaaataggttagtggttgctagggattgggggaggggggatggggagtgactgtgatgggtaagaggtttctttttgcggtgatggaaaggttctggaattagatggtggtgaaggttgcacaactctgtgaatatactcaaaggcactgatttgtacacttaaagtggttaaagtggtgcatttatgtgaggtggattttaccttgattaaaaaataaagcgagcttgtgaaaacggcaacccaggaagtcaggatccctggtttctagatccattctgccacttgggagcagggtggcctggagccctcttggggtagcccttgactggagaaggtgagtcgttcttagctgagccctggggcccctgcaggggatattctgaggcgcggcttccggcagtggggagaaggctgcctgttcacttgactgttcccccgccctgcgcacctggcctggccaaatgcccagagaactttgttataaaagcatcaggtgcaaaaagcgtggcaccaagtttgacttctattattttacttattattttgtacataattcctgtagaggaattagaaaatgcaggtaaggaattagaaaatgcaggtaagcaatgcttcctccccaccttaatctcaccacccaatttctactaacattttggcatgtattattgtattatatattatttgagacttaaacaaacataagtattttatatatgtatttatatatacacatgtacatgcatacatatataatatatacatatattcatatgtatatgaatggatttctattacacagactgttttatatcctgatttttgaaaaacctaatattccaagaacatcctttctggtcagtaggtatcgatctgcatttatatctccatcatcacacttaatgcctgcctatgttttgtcatagacgtgggccctgttttgattaatcctctcctggtgggtattcaggtcatctccaggtttcccaatgtgagtaacaccctcggcatatgcacatccttcgatcctttgtgcatatctttccttaactctgagaagtagatatgtctttgtacattttaatggcttttgaaacattttgttcagttgccctctagaaaggttttacttgtttatactcccacctgtgccctgtttgtacagggtgccattttccctaaacttttgctaccactgtacattaaaaaaaaattgccaataagatatttcctttttatttgcattttttattgcatttaaggtagaactttaaaatatatttattatccgtattgtggaattttcttcatggttttgcaatattcatcttttattattgattttcagagccttttatgtattaagaatacattgcaaataatttctcccaatttttcttatgctttaaaatttttatggagactttttttcttacagactttgtgaatttatggcatcaatctttcctttatgaagtgaggctttagaaaattagtttttaaaagaaaaacaaaaaaaaaaccctgtgttttttactgactgagtaaatcatgttcaaagtaaagttaaacagactcatcctttgttttaaaaaataaaaccattaacgaatactagcttttatatccatgaaatttttcttttccaccttcataatttgttttctaattacataacttgtgtcttttgaatatttattactttttaattttaaaggtaatggttaagcacctataagctcaccatccagatagcctgtgtttccttacagtcttttatgtagatcatgctgagataatgtgtgtgtatgtgtgtgtgtgtgtgtgtgtggtttaatattctgacatttgcttaatatattggcaccatatttcaaatagaaaataaacattcattcatctgcactggagggatggagaaatatatgggtgggtggagcatagatgaatgccgatatacagttgaataagtggacagacaggtggaataataacctgattaatggatagatatagtgcttaacaaatggtagctatagaggaatgtggatagttaggtcaaagcagacgcacagatggaaggacggattgataaatggatgagtggaaagaaagaaaactagaaaaagagttatatttaatgttcggttatagtaactatgcattctacactgaaaaaaattgaaacacctttgcatggtgtttgagaatttctttaatttggcttcagaaaataatttttctattgatctctcttaatccctttggcaacctatgctccaatcccattgactttatcagattatgattagattaggcgaaaccacatgaaattgctgtttaaatgggtcaaagatagttaaatacaagaattttcatatggttcaacctaatagctgaaggtatcctgggagatgatagataaaagggatgattagataaaacaataaaaaaagatggctgcttggataactaggtggtagatgaaaaagactgttggatgaaccacagtgaggtaccacttcacacctactaagataatagtaataataataaaccagaatatagcaagtgttttgaggatgtggagaaattgctggtgtgctgggacattggtggtttgagtgtaaaatgattcggctgctgtggaaaactgtttggcagttccttgaaaagctgatcatagaattgctaatgaacaaagaatcctactccaggtgtgtgtgtaccccaaagaattgaaaacagggactcagacatttgtgtgctaacgttcactgcaacattattcataatatgaagttaaaagatgggaacacctcaagtgtccatcaacagatgaatgaatgaacaaagtgtggtacaggttaaatataacttatctgaaatgcttggaacagaagtgtttcagatttctgatgctttttggattttggaataattgcatatacttaataagatatctttgggataggacccaaatctaaatacaaaatttttttcatatatactttgtaagcatagcctgaagggaattttatagaatatttaagataattttatgcatgaaacaaagtttaagtacgtatgtgtggagttttccacttgtagcattatgttggcaatcagaaactttcagactttggagcatttcaaatttcagattttcagattatgcatgttcaacccgtatatgcctagaatggaatcttactcaaccataaaaaaaatacagattaaaaaaacactactgatatatacaacaaggatgaaccctgaaaacattatggaaatcaaaataagccagacacaaaagaacaaatattgtatgattccacttatatgaaatatctagaatagacaaattcatagagacagaaagtagactagaggttactggggcgaaggggagggaggaatggggagttattgcttaatgggtgcagagtttttgtttgggggatggaaaagttttagaaatagtagtgatggttgtacagcattgtggctgtaattaaagccactgaattgtacacttaacatggttaaaataacaaatttcatgttatatgtattttaccatgataaaaataattaaaaaaaaattgatgtatggctgtttatagacggtgtatgaatggatttgtacatagatgagtaattgaagaggtgggtggctttgttaagggtgagtaaataggagtggatgaacatgcatatgaacgcatgagtagatgaatgggaagctgtatagatggaatgggagacaatgggtagggaggtggagagttcgtgagattttacctgtggctcggccatggatagaagctggtgacagaggtgactgagtttttcctgaacctgccctgcctaagggtggctacaggctggcagtgatcgagaaacccttggccaaaaactacctctctgttgcaggctccctgcagctcgatctcaaccgcatgcccaagccagccaagacagccaagaagtgctccttggaccagctggatgatgctttccacccagaatggtttgtgtccctttttgagcagaaaacagtgaagggctggtggccctgtgtagcagaagagggtgagaagaaaatactggcggtaagtctacttcctccagccccagtggagggcatgggggaagcttcttccatagaaattgtcagaaaatacgtcatcagaaaatacatgcttactgttcctcctcctttctccccctctcctgcccccatcccccctctctctctattttccaaggcattctccctctttcctcccaattcccggtcgccttctcctttgcggctcacatcccaggggaagcctatttaaaccaaaagattactctgtttatactctactcattggctttaatagtgacctgtgtcctgggttccctctgatctggacttcctgggtgaatgggcgggggtcatgcctctcccatttgagcaggaccctccaagggaccatccttattctgctctctgagaggtctgcttagaggggtgactggagggcccgagagaaccgtccttcccctgagtccacagcagccatggagaggaagttaatccctgaaagtttacttagaaatttcaggcagccagccaaccctgaaagtggtccttgaaattgaatatacttgttatataaagagtggtaacaataagaaatactagtaccccaaaggaaaaatgagaaaacgacatgcatagctaattcacaaaataattaccaatgtctgcaaagcatttttaaaaaggtttagtctctccagtaattaaataaagggatacagtagtcccccccttatctggaggagatatgttccaagacccccaggggatgcctgaaactacagatagtactaaacccgtattatgtactgtgtttattcccatctatacatatctatgagaaagtttaatttctaaatgaggcacagtaagagattaacaacaataactaataatagaacaattataacaatatattgttataaaagttaggtgaatgtggtctttctctctgtgtgtcaaaatatcttactgtactgcccacgggtagctgaaaccctagaaatcaaacccaaagataagggaggactactgtatttttaaatgtgttttttttgtctgttaaattatatatatttttaaaacagaaatgctcattgctgctgagcatgcagagagaagacaggccccccttttacttctgctgggagcactaatggttttactgtgtggaggaagaaatttgataacatatagtaacagatttaacaatatttatgccctcggactctgtcatccgacttctaaaatccttctaaataaataacccaataaattttaaaagtctaggttctgggatatttgttgcagcattatttaccctatcaaagagttggaaacaacctaaatgaaccaaaataagtagtttactaaataattatggtcaaccatcccatacaatgtttggcagtcattaaaaaccgaactttaaagaatagacaactacatagtgaaatatattccgaagtgaaaaaagccatctatggaactgtatatgcacagtgtgacatttcataagcttgcagagaaaatcagctatgatgcatgcaaatgttaacagtgcttgtctccatgtagtggaagtaggggtggcagtctcccttctttatacatttctgaagtttccaaatgttttacaaagagcaggtgctgcttttatgttcagaaaccctacatctttttttttaaataatgaagtggcccttatgttttttctggcctggttactctccaggccactgagcagagccttcgtgcccctaaccaagtgctctctgtcccctcagggcaagctggaaatgaccttggagattgtagcagagagtgagcatgaggagcggcctgctggccagggccgggatgagcccaacatgaaccctaagcttgaggacccaaggtcagtgcccagcccctgagccccaatgcccacaggtctgggggtataggccacagtccaggaggcatcccattgcatggccatgtagaagtcacaaagcccacgtggctcagagaggggcacgactcatccaaggccacacagtaagttagggggaaggtgatgggcatctgtccagagaacactgggctcagcgaattcaagatgcaggtgctattgggtacctgttggttgtgtgccaagcatgctatcctatgcatgtgtacattgtgctatggaaccttccctgcagggtagttgttattatccccattttacagatgaggaacaatctcagcaaagttaaataagggcattccagctaggacagtggtgaagcagaaatgctctcacctggtctgattggctccagagcccgatcaaggtcttgaccctaccaagctgccttcggtggctctcctatggtgccagtgtgactttcaaatggtttttcagccttcatttttccatctgtgaaatggggagcccaatccctgtcttccctacatcacagacctcttggggagatagaccaagccaatggatgtagatgctgtgaaggcagttacaggggcagagtcactgaaagatggctgtgggggctcaggaatgtgtttgctggatcccgccccaccagcctacttggctcaagttggatttagcatagatggctcagttagtcaccatgctgtgattagcaccgtgtgcctgagtgccatggggctggcagagcagtgagaggcacccttgcctaaggatgctgggatctgcacaggaagaaaagagagacccgtgagacaccagtgtgcaatctgatgttaacggggccatgatggagacccagaatcctccacgtattttgagatgtggagctggcctagggaaaggttttgagattcttggttgtgagagaaccagcttcctatgttctcttcccaccgttgttccctgagcatggactagccatgtgcatctgggcaggtgtcttggcttatctggggctcggtgggctggagagcactttgaagcactgcccagctcctaaatctgcagtttgtgattaagtcctgggtcaggaatgggtgagggcaccaaggaaggtgtcctggagaggatggcagagaaactgggccactgaggatgcttagggcttggcagcacccagaagaggagggcagcacaggtgggggtgatactgtagcaagggcttgggggagagggaatgcaaggtgcaaagggctagtttagggacagggcctgggcaggcgctgggggtggactgtggagggccaggccattggacctgctgttgagagaagagtttggagaaagcagccctagtaaaggatgcccagttgacctccgggatctcgcttccaggcgccccgacacctccttcctgtggtttacctccccatacaagaccatgaagttcatcctgtggcggcgtttccggtgggccatcatcctcttcatcatcctcttcatcctgctgctgttcctggccatcttcatctacgccttcccggtgagcaggcctgacgacactgtggtgggggaactctgggtctaatgggggagttcatcattgtcctcaaagagctctcccagtctaatggagagaagtaacctctgtccttggagagcccctggtctgatgaggatacagagcccagctctggggagtctccaatctggtaggtgtacaaagttctacccttggaggctcttagtccagtgagagaaactgagttcttgcccttcatggtgagacaaagctgtcctcagcaagcccctagaatttgtaatgaaggggttaggagaagatgaggccctttgggttgcggtgggcagggggactttctggaagggaggtgtggaactgggtctgaaaggaaggtgagatgttgatggcagagcagagaaggtccctttgtcttaacagcagttgcaaatccagaggaagggaggagctggggctgggagagcatctcagggtccacctgaggcactcaatagagtgtgtcctgcctcctgcagcaggtgggcatagggaagctgtcggggagcgggaggctggcccaggagcccttacttggctcggtgcccatttgggtttcctttcacttggtaagaagccaattgatgagcttgtggggccataccagaggtggctgtcgtgcccttgctctgtggggccctgcctgggggaggaaggtccctgcctgtgcttccccagcccgcacagctcatcagggaacccggatcaccagggagcctcccccagtgtctctgatactttagaccttgaaggggttgcagcattctcaggctgacacctgatttctaatgctctttaaaatttaaaagaaatctttttaatatgaaaactccaaccctatataaaagtggagagaatggtgtaatccaccccttgaggaccttatgttggtggcaaagacgcaaacacccagagaaggaaagggcctggccgtaggctgcacagtattccatgcacactcccaatccagggctcactgtgattcccacttcaggcctcagtcctggtcagcaccaggccactggcccagagcattgatcccatggcagacaggctgcttggggaactgcccccaggtgagctctttgctctgtgagtcctccaggaggaggaaagggcaagagcccctccatcccactgcagctggctatgcccatgtctgcagaatgcatctcagagaggaagagagttataaccacacagctttccatgcagttctaacagctgaactgagaggagctggggaaaggatgtctggtttggatgtccggaccagctaccatctgggccatagtgactaaggagagtctagaaccagggtggtgaagggtctgcctacaggccaggcctgctaagctggctgtggtcacctgaggcgcaatggagaaatgtttctgaggttctgaggtttgtccatcagcaaaatctgactgtggtccagggtagatctaggttgcagggactcgaggtgtgtacgatgtgggaggcctctttaagccaagggagacgagattacaaatataagctgagatacaggactgtggaagagtgtgtgcacgtgtggtgtcctgcagcatgagctgttgctgtgacctgagatccggggtcaggccccaggacttctgcctggtgtctcctgcccagggggcacccttcccagcctgcctcaagctcctcctcccattcggagcccagctggccagtgttcagttagccacagagactctaagcacgtgtgtgcgtctgggaggtaagggcgtgttttggggatgagggagaagaggatgaggcctcatgccactggggagtgctcacttccctggggagacattgaaaccagagagtaaggaaaagtactgtggatgatcaaatgctcttttgggaggctcaggccgtgggagtttaggaagagaagagctgctgcagaccctcgcccttggtgtagtcggaggactagcagcagtagcaccagggaactcactagaaactcagagtccccggccggccccggcctgctgagggggaatctgcatgtaggcacatgatggttggagaaaccctgttggatgtgacagagctctgtcgctggagtcaggattatggactcttcctgtgaccttggcaaatccctcctgctcacatgaggaaggggctgcactaggttagctctggccttctgtggctgggactgtgcttaggggagcactgtcatcttccctggctgctgtatattaagccaagcctccttctgaaaagccaaggggaggggaaaggcaggtccaaagtggcatcaccaccacccatgacatgcctaagcccagcccctgccagctgcaccctgcactgctaggctactgggcagcagatctaggcctccaggggcctggggaaggaggccctgctgcctggctgggagaggaaggaaagatttccagtcacttccagcctgtggtccttcctcatcgctgtgggcagaagcagagtggtactgtggggggcctggtcagagctcctccctgtctcctgtccccccagcagcgggccactctcctttgagttcttctggaagttgtcctctttaaaatatggaccctgcttcccctctcccagggctggtgtggggatgtcagatcctaggtaaggggtctagggatgaagggggtggcctgggcctgaggctgcagactggctttgctcacaggtctttgctacaagctgagcacatcctgcctccttccacccaagtcactcattcatttggccagtaccagatgatgagggccgggccctggtgaccctcacctggctttcaggccatgggacagaggctgcctgccccaagccagggcctagtggagaggggcccaaggacagggcagcttcctccagttggcctaatcccctaccctcttggaaattcccttgggaggggtatgagggggcagcctgtctgattcctctcagcttccccctcagagccagccgggagcagggccagcgtggggaggcaggaggcgtttggcggggaaggagggccggctctgtttccagagttggctttccccagccggcgctggggaacatactgtcccaattaggagccctgtattgtgttgtatgtgttttcatggtttttggggggagaagtggggaggggaggatactgtcaatcctgcagcaggcagggctcaatcaagggtgccctgtctctagtgctgggctgtgccgtgggtcatccacgacagcccatccccaactctctctctgctttctggacaggggtgtgatgacccgtaagccctgggctgccatgtgggggaggaccctgggccccaccttcagcacctgtctgatggaagaggccaggtccagggtgctcagagtcctctgggcagtcagctggaacctggaaatgggcctggcttgatgggggagaagacagagcaatttgggcagctttggcccccaggtgggagggtgcgggtggagtttcggagggtatgggtttgcctgatgggctggagcactaggcagggcggagtgttgagccccacatggtatggatggcaagtggtgagggcgaggcgtgggcaggtggttgaagagccacgagcgtcctctcccagcctcttgcctgttggcagcttagccccatcctctgagccccaggtctgggacagctgctctggctgtgcctgccccagtgggatcaccatgggtccctgtctcctccctccctccagaactatgctgccatgaagctggtgaagcccttcagctgaggactctcctgccctgtagaaggggccgtggggtcccctccagcatgggactggcctgcctcctccgcccagctcggcgagctcctccagacctcctaggcctgattgtcctgccagggtgggcagacagacagatggaccggcccacactcccagagttgctaacatggagctctgagatcaccccacttccatcatttccttctcccccaacccaacgcttttttggatcagctcagacatatttcagtataaaacagttggaaccacacagca

SEQ ID NO: 100 - RNA, 6911 nt, Homo sapiens
  source 1..6911: mol_type = mRNA
tcgaccgcccagccaggtgcaaaatgccgtgtcattgggagactccgcagccggagcattagattacagctcgacggagctcgggaagggcggcgggggtggaagatgagcagaagcccctgttctcggaacgccggctgacaagcggggtgagcgcaggcggggcggggacccagcctagcccactggagcagccgggggtggcccgttcccctttaagagcaactgctctaagccaggagccagagattcgagccggcctcgcccagccagccctctccagcgaggggacccacaagcggcgcctcggccctcccgacctttccgagccctctttgcgccctgggcgcacggggccctacacgcgccaagcatgctgagggtcttcatcctctatgccgagaacgtccacacacccgacaccgacatcagcgatgcctactgctccgcggtgtttgcaggggtgaagaagagaaccaaagtcatcaagaacagcgtgaaccctgtatggaatgagggatttgaatgggacctcaagggcatccccctggaccagggctctgagcttcatgtggtggtcaaagaccatgagacgatggggaggaacaggttcctgggggaagccaaggtcccactccgagaggtcctcgccacccctagtctgtccgccagcttcaatgcccccctgctggacaccaagaagcagcccacaggggcctcgctggtcctgcaggtgtcctacacaccgctgcctggagctgtgcccctgttcccgccccctactcctctggagccctccccgactctgcctgacctggatgtagtggcagacacaggaggagaggaagacacagaggaccagggactcactggagatgaggcggagccattcctggatcaaagcggaggcccgggggctcccaccaccccaaggaaactaccttcacgtcctccgccccactaccccgggatcaaaagaaagcgaagtgcgcctacatctagaaagctgctgtcagacaaaccgcaggatttccagatcagggtccaggtgatcgaggggcgccagctgccgggggtgaacatcaagcctgtggtcaaggttaccgctgcagggcagaccaagcggacgcggatccacaagggaaacagcccactcttcaatgagactcttttcttcaacttgtttgactctcctggggagctgtttgatgagcccatctttatcacggtggtagactctcgttctctcaggacagatgctctcctcggggagttccggatggacgtgggcaccatttacagagagccccggcacgcctatctcaggaagtggctgctgctctcagaccctgatgacttctctgctggggccagaggctacctgaaaacaagcctttgtgtgctggggcctggggacgaagcgcctctggagagaaaagacccctctgaagacaaggaggacattgaaagcaacctgctccggcccacaggcgtagccctgcgaggagcccacttctgcctgaaggtcttccgggccgaggacttgccgcagatggacgatgccgtgatggacaacgtgaaacagatctttggcttcgagagtaacaagaagaacttggtggacccctttgtggaggtcagctttgcggggaaaatgctgtgcagcaagatcttggagaagacggccaaccctcagtggaaccagaacatcacactgcctgccatgtttccctccatgtgcgaaaaaatgaggattcgtatcatagactgggaccgcctgactcacaatgacatcgtggctaccacctacctgagtatgtcgaaaatctctgcccctggaggagaaatagaagaggagcctgcaggtgctgtcaagccttcgaaagcctcagacttggatgactacctgggcttcctccccacttttgggccctgctacatcaacctctatggcagtcccagagagttcacaggcttcccagacccctacacagagctcaacacaggcaagggggaaggtgtggcttatcgtggccggcttctgctctccctggagaccaagctggtggagcacagtgaacagaaggtggaggaccttcctgcggatgacatcctccgggtggagaagtaccttaggaggcgcaagtactccctgtttgcggccttctactcagccaccatgctgcaggatgtggatgatgccatccagtttgaggtcagcatcgggaactacgggaacaagttcgacatgacctgcctgccgctggcctccaccactcagtacagccgtgcagtctttgacgggtgccactactactacctaccctggggtaacgtgaaacctgtggtggtgctgtcatcctactgggaggacatcagccatagaatcgagactcagaaccagctgcttgggattgctgaccggctggaagctggcctggagcaggtccacctggccctgaaggcgcagtgctccacggaggacgtggactcgctggtggctcagctgacggatgagctcatcgcaggctgcagccagcctctgggtgacatccatgagacaccctctgccacccacctggaccagtacctgtaccagctgcgcacccatcacctgagccaaatcactgaggctgccctggccctgaagctcggccacagtgagctccctgcagctctggagcaggcggaggactggctcctgcgtctgcgtgccctggcagaggagccccagaacagcctgccggacatcgtcatctggatgctgcagggagacaagcgtgtggcataccagcgggtgcccgcccaccaagtcctcttctcccggcggggtgccaactactgtggcaagaattgtgggaagctacagacaatctttctgaaatatccgatggagaaggtgcctggcgcccggatgccagtgcagatacgggtcaagctgtggtttgggctctctgtggatgagaaggagttcaaccagtttgctgaggggaagctgtctgtctttgctgaaacctatgagaacgagactaagttggcccttgttgggaactggggcacaacgggcctcacctaccccaagttttctgacgtcacgggcaagatcaagctacccaaggacagcttccgcccctcggccggctggacctgggctggagattggttcgtgtgtccggagaagactctgctccatgacatggacgccggtcacctgagcttcgtggaagaggtgtttgagaaccagacccggcttcccggaggccagtggatctacatgagtgacaactacaccgatgtgaacggggagaaggtgcttcccaaggatgacattgagtgcccactgggctggaagtgggaagatgaggaatggtccacagacctcaaccgggctgtcgatgagcaaggctgggagtatagcatcaccatccccccggagcggaagccgaagcactgggtccctgctgagaagatgtactacacacaccgacggcggcgctgggtgcgcctgcgcaggagggatctcagccaaatggaagcactgaaaaggcacaggcaggcggaggcggagggcgagggctgggagtacgcctctctttttggctggaagttccacctcgagtaccgcaagacagatgccttccgccgccgccgctggcgccgtcgcatggagccactggagaagacggggcctgcagctgtgtttgcccttgagggggccctgggcggcgtgatggatgacaagagtgaagattccatgtccgtctccaccttgagcttcggtgtgaacagacccacgatttcctgcatattcgactatgggaaccgctaccatctacgctgctacatgtaccaggcccgggacctggctgcgatggacaaggactctttttctgatccctatgccatcgtctccttcctgcaccagagccagaagacggtggtggtgaagaacacccttaaccccacctgggaccagacgctcatcttctacgagatcgagatctttggcgagccggccacagttgctgagcaaccgcccagcattgtggtggagctgtacgaccatgacacttatggtgcagacgagtttatgggtcgctgcatctgtcaaccgagtctggaacggatgccacggctggcctggttcccactgacgaggggcagccagccgtcgggggagctgctggcctcttttgagctcatccagagagagaagccggccatccaccatattcctggttttgaggtgcaggagacatcaaggatcctggatgagtctgaggacacagacctgccctacccaccaccccagagggaggccaacatctacatggttcctcagaacatcaagccagcgctccagcgtaccgccatcgagatcctggcatggggcctgcggaacatgaagagttaccagctggccaacatctcctcccccagcctcgtggtagagtgtgggggccagacggtgcagtcctgtgtcatcaggaacctccggaagaaccccaactttgacatctgcaccctcttcatggaagtgatgctgcccagggaggagctctactgcccccccatcaccgtcaaggtcatcgataaccgccagtttggccgccggcctgtggtgggccagtgtaccatccgctccctggagagcttcctgtgtgacccctactcggcggagagtccatccccacagggtggcccagacgatgtgagcctactcagtcctggggaagacgtgctcatcgacattgatgacaaggagcccctcatccccatccaggaggaagagttcatcgattggtggagcaaattctttgcctccataggggagagggaaaagtgcggctcctacctggagaaggattttgacaccctgaaggtctatgacacacagctggagaatgtggaggcctttgagggcctgtctgacttttgtaacaccttcaagctgtaccggggcaagacgcaggaggagacagaagatccatctgtgattggtgaatttaagggcctcttcaaaatttatcccctcccagaagacccagccatccccatgcccccaagacagttccaccagctggccgcccagggaccccaggagtgcttggtccgtatctacattgtccgagcatttggcctgcagcccaaggaccccaatggaaagtgtgatccttacatcaagatctccatagggaagaaatcagtgagtgaccaggataactacatcccctgcacgctggagcccgtatttggaaagatgttcgagctgacctgcactctgcctctggagaaggacctaaagatcactctctatgactatgacctcctctccaaggacgaaaagatcggtgagacggtcgtcgacctggagaacaggctgctgtccaagtttggggctcgctgtggactcccacagacctactgtgtctctggaccgaaccagtggcgggaccagctccgcccctcccagctcctccacctcttctgccagcagcatagagtcaaggcacctgtgtaccggacagaccgtgtaatgtttcaggataaagaatattccattgaagagatagaggctggcaggatcccaaacccacacctgggcccagtggaggagcgtctggctctgcatgtgcttcagcagcagggcctggtcccggagcacgtggagtcacggcccctctacagccccctgcagccagacatcgagcaggggaagctgcagatgtgggtcgacctatttccgaaggccctggggcggcctggacctcccttcaacatcaccccacggagagccagaaggtttttcctgcgttgtattatctggaataccagagatgtgatcctggatgacctgagcctcacgggggagaagatgagcgacatttatgtgaaaggttggatgattggctttgaagaacacaagcaaaagacagacgtgcattatcgttccctgggaggtgaaggcaacttcaactggaggttcattttccccttcgactacctgccagctgagcaagtctgtaccattgccaagaaggatgccttctggaggctggacaagactgagagcaaaatcccagcacgagtggtgttccagatctgggacaatgacaagttctcctttgatgattttctgggctccctgcagctcgatctcaaccgcatgcccaagccagccaagacagccaagaagtgctccttggaccagctggatgatgctttccacccagaatggtttgtgtccctttttgagcagaaaacagtgaagggctggtggccctgtgtagcagaagagggtgagaagaaaatactggcgggcaagctggaaatgaccttggagattgtagcagagagtgagcatgaggagcggcctgctggccagggccgggatgagcccaacatgaaccctaagcttgaggacccaaggcgccccgacacctccttcctgtggtttacctccccatacaagaccatgaagttcatcctgtggcggcgtttccggtgggccatcatcctcttcatcatcctcttcatcctgctgctgttcctggccatcttcatctacgccttcccgaactatgctgccatgaagctggtgaagcccttcagctgaggactctcctgccctgtagaaggggccgtggggtcccctccagcatgggactggcctgcctcctccgcccagctcggcgagctcctccagacctcctaggcctgattgtcctgccagggtgggcagacagacagatggaccggcccacactcccagagttgctaacatggagctctgagatcaccccacttccatcatttccttctcccccaacccaacgcttttttggatcagctcagacatatttcagtataaaacagttggaaccacaaaaaaaaaaaaaaaaaaaaaaaaa

SEQ ID NO: 101 - DNA, 53001 bp, Homo sapiens
  source 1..53001: mol_type = genomic DNA
aacaagtaagtctgtaaagactgaagggaattaacatttatgacagattccttaatgtgcaatagctcatttagacctcacaacagtatctccctttaccctgggggatgctaaatctcaaagcagtcaaatagtgttcccagacccacatctagtgagtggcagccagaatttcaagtcgggtctgtaggcctccaaagccagaggcttctttctactgcccatccaacctttctcaaaaggcaaataaggtcatgcatttttatttactgaattttaagtaaagcagtgtcttttgaagcgggcccagtgccacttgcagcagaatcacctgggatgtctattacaaatgcagattcctgaaccttctccacatgaactgaagcagacttgctagggccgagggagacccaggaatctgtattattacaagctctccaggtaattggagagactttacaatttgggaaccatgattttaaactaataatttagtgttccattctagtgtagtttatttatggatctgtggctcatggaaatttcctcctagtatcaggaagatacaacttaaaaatagtctgtttttccttcctattgtatccactgaattccacggaaaatgttaaggaactggaggtgtgattaacactgattaatctaggctccgtacgtcaaaggcacagactgacatgaacatacatgctgattagaatcatacagagctggaaggggatgggcaaagaaatggcattagctaaatatttactatgttccagacactgtaccagacacattacgtcatttaaggggcccaagacaagtgattcaatcccttttatttataaacggggtaggtactattattatttacattttagagatgaagaagctaatggccagagaaaaacagtcactttctgagatcattcattcattcatacaataaaaatctcattagctcttatcttatgaaagacattgcaaatagagcagcaaaaaggcagtctagggacctcaggtggcacaaagtccaccaaatctccattgaagaaactggaactgagagggcaaattgggactggagcctgccagaagccatctctctggaatccctcagcctgagcaagaggggagtttgctgctgaggctgctggagctgcggtgtagagcaagttgcaggcctctgagcctgttggaggttcagaaaggttagctgacttgcttaagtaagtgtcctagacaggagggagaaagcgcgcgggtctcagatcccagctccaatatccacgccttttcccttttcatctcccggaaggaagccttcacaggtggggaaaatgctcacccagtgactctaaagtagtgcacaaattggcattaatcagaaccattctgattcctgctatcaaggtttatttaattctaagctcaaatgacacagaaaataaaatttcctccttaaaaggttctgcggaaaaatattctctgttctacgtaacagcctccttggctgtgtttgtgtctgaagaaaggactagtctgacaggaagaattacaaatctggagctcattttggcgtcgcagagggaaggtgggtggagcgtctcgcagtaaattaggaattcagaatgaaaacgtagagtttatttgggtttttagtgacacctcaggattattatacagcagtgtcagacacagctcaaagtaatgatgactgctccccctccgccccgcgggagctgggtgctaagaagggggaacccctcctttgaggggttggggtggggatcctccctttccaacctggatcgggaaggggtttgagaggagtgcggcttggatccccatcctggatctgtgctggagggaggcgggaggctatttgggggtgtgtttgggctcaggatctgggtctgacgctgggatctgaggactttctgggtttggaactgggtgggggagctgggtttggggtgaccgctgggagcaggaggaaataggagagtgagtcgcatgtgaagggcactgaggagggatcttcgggggaatgctgaagttgatgcgtggacttggagaggggaagttgaagtggatgcaggggcctggcgctgcagcggatctgggtggcatgtgctgggattgccaatgcggagctgtgaatggggtcagggtggggctgaggcagtaccagatcttccgcgcctagaggaggttagaagaaaagagcgtcgaacggccacagcctttttccgaaagagactcacacagacacacccatcgctctacccggccctccggggctagcggctgagcggtgctggggctggcagaccccgcccccacgcggcctctcggagccgggagccgatcgggccggggctggggtctggcggcccagcccccggggagcgtggggcgtggccagaaaccggcgctcgcggctgcggattggctgcctggcgggcccgcaggcggggctcccggctgggtcccgcttggcagctcgcggcggcggggaggcggggccggcgggagcccggcagccaatggacgcgcgtcctccgagcagttacaaagggccggagcgaggccgccgcggcggctagggaggtggggcgaggcgaggtttgctggggtgaggcagcggcgcggccgggccgggccgggccacaggcggtggcggcgggaccatggaggcggcggtcgctgctccgcgtccccggctgctcctcctcgtgctggcggcggcggcggcggcggcggcggcgctgctcccgggggcgacgggtgagcggcggcgcggcgggcgggcgactgcggggcgcgcgggccggacccggcctctggctcgctcctgctctttctcaaacatggcgcggggccgggggcgcaggtggcggcgccggggcccgggccgggctctcgtggcgccgcgcggctcggcggctgccgggcgaaccgcaagcggggagcggaggcggggcaggggcgtgtgtccgggcgcgggcggacgtgtccggctgcccgaggccgccccgctcgggactccccggggaggtggagtcgggcggagtcgtccgaggtccggggctgccctctggggtgtgagtgggcgagggccaggggcggagagtgcgaggccggcggggactggcagagccgtggctgcccgccgccgccccctgggcacggcgtgaccttgttctggggacccccgccccaagagggtccgtgccagaggctgccgaacccggggcggggtttgaggttggggtggaaggcggctcccgggcggggtgtgagctccgagcctctagggcttcgtccagtgggagtcgggggcgacgtgtggtgagacccctgggtccgcaggccgccctgactcccgcccggctcgacccgagccgaccctgctggaaggggctgctcctccagccaggggggctttgtgtgagaagaaggaagcgcggagatgcgcggaatgtttcttctttcgtgcgtctggggagtgttgaagtgagtccagtaaccagacggctacggattgttttcatagtggaaacttgaacgtttgctcattctgcgggttttggaaattttgggaacgactgtgaattgattaaacgctttttatttcctcgaaggaacatcactcacgttgttccttttcttgagtgacagttaatagtttgattcagacatctgtatagctggttttcaaggaagactgttggctggatttttcaaaatagtaaatcaggttggggtaggtggttggtatccacaaagggatgagtgaaaaacttcgttagcagctgaactgagacactagaagctaaaatacacagcctcagtgttagcaactaaaatgcagtgaaagtacatttctgtttctgaaactggacaaaagatgttgaaatttttttaaaaaatcaagactgacggtgacgattataatcagtcctaatagctaccgtctatgtattgtgcattactacgatgtaaatgcatacactattgtataattacattatttaatcaccacaagtaaactcccaggagtagtggcatttgccccactttacagatgtgcaaagtggggtacagacacgttaagtacccaataacttaagtgctaaagctaggattttcactcagatctcagtttcccaaacctgtatgtcatatatatatataaatatgtatacatcatactatctggcgtagcccatttttcttcttcagtcgtctgatgagcaattggtctttattatccactttggattctgtcctcatgatttgagtatcagataggcttcattccgactcttagcacattgttgagtcccttcacgtgggcctgcattagaggaaacaatggatttttgacattggcctagggaggaaggcaggataactgtgtggacatttgggagaatcagtatagttaggcatgaaacacaggtaacatttccacaccgctattaacttgaataacacagtgcactcttttccaccagaagtagcacaagaagcgttcatgtattcaagtaacagtagtggacttagttgaagacacagaacattgctcagtccatgtcctggaggagtttacagtctccatggtatgcacaaaatacaaagctgtccaggtgcttattactctaagcccagactgcctcagcttgtctgcctcccctgttggttatgatgatgcctcagtccacccttaaaaaacattctgaaaaaggtcaaatgctttttatttcctctgtaacttggcttcccttttaaagacttgcacctttttatgttctgagtatgttttaatgttctctgcccaacttctgtctccaacataggtttctctagggaaattgattccttatccctagtgcacagtttagtaccactatgtctatatgtatatcccatctgagaatgctatttgcttcctttctgccatttcataactttttttctttgaaaacgtgcccccaatccaactcttctatgaatgcctcttgaatgtctcctcctttcttggtatgcagccttcagcttaatcctgcctgttatcctccaaatctagttgctttcccatgtttttctcatctaggcttttctatggctactgccaaactaatcttcctcagccttccccgtgaaggtttataagatttcccatttgtattcagcacttagaacaacacttagcagcttatgattggggccatctctgagtatcctaccagggatctcatttctcattactgcagaccttcgagcaatttctctttctcactgactcctgactgttcagccttttcactacacatttagttttgcccctttttttgggagtgcgagaagttctcagccctgacttcctgtgctggtttagttcttgaattctttgtcttccagaactctgcaacacttaacagtttgtgttgtccatttctactgcctgtgctgctacttaactctacttgaatgcgttataggtacccagaggacaagattcatgccatttctttcttttgtggcctcagaacttagcactgtgttttatattctattccacataaatgcttgttgatttctatttgagcattcctttaatatttatactgttttatgtaagtccagtttatgcaatattaacttgtaattccgtataaataatcaggaaaagttgtatggcgtgttgaaagcaattggttatttgtcctaccttcaccagcagttatgcagaaaatggggcaatacctacttttgcctaattcatgagattgtgaagatcacatgagaaagtggtatttgagtttgaggttgctattctgtgttgttgctaaagagcaggactgatgttcaataagcagttcccactgggccatgtgtgttttggttaaacatcctttctgattggttggtacccttgtagtgccagttgttaaatatttttaatatcatttctatagggaggcattagtattcaaaaagggaaatgattagtgtaagctggaatgattgggggaggcttcttggacactttaggacttacactgactttgaagggtgggtagaattcagagggggatttgatgagtgtgaaagttcttttgaagttgtgtccccaactgtcctggggcctactccaagggaggaaacaaggcttttactgactgactggcaagttactcttcagagttaggttccttattctgtactgtggaatttggatgtattaacctctatcattttttccccaatcctaaaagctatagtacatagctggaaacaaaacataaaagtaatcaaagtggaatgagtgagggagaataacattatgggatgcccagtaggactaggcattcaaatggtggaagtcctaagtatattatcacttcaatttacagatgaaaaaacgactcaggtgaatttcttagggtggcacaggggcagaacagagacaggaactttgattttctgattccatatcttgtgccctatatggtgctttaaaatgtgaaggacttggaggtgggagtgggacagggttgggataggtggttggcatccacgaagggatgagtgacttccttaagtgaagtaggccttgaacttcacagaatttatgaaaagtgaattctaaaggtggaagggagggggaatgattaaagccttaaagttctcaaggaaaaggtcaatttttttttaattgctgataaaaggacctggtatatacttattgattgagaaaagtaggcctatagtagtttggaagatggtcttgagtaagtacagttaattgaattggggtgtagttagaaggctttggtttagaatattagatgatccgctttgttgttgaaattaagagaggaattgacataaaaataatcaagaggaagataaatcttgttcctgtgaggagggccgctcatgtagggaagacccctgtcaaaaggttctaggccttagttgagcagttacagggactcaacaccattcttgtagtgtcattttattgcaccaaatatgttcatgtgtaataaatggaattttgaaaatgccattatcctatggatggcccttctgatgtgagaacgtgtctcttcaaaccacagagccccttgcaaatgtcgacacacctcttgccttttgcagttcttccttggtcatggcttacgtaacacagagttctctgaacagatggactgtggtttgatatcatgtgattgggtcacatctttgcttcctgcttttggaattgagggcagatgctggcatatttctcagggattttttaatgctttgtcccatagaactagcttgaggaaaagttttggagtcttctcagaatttatggtcagttttgacccagcctaactccaatacttaggattacatttaatgccattcttagctgaattttctcaatgtcaaatccaggcagtctccataaacattaaaattgtttaccactctgaattagatccaattttatgtgttttgtttgctttccaggtaagtttcttatggctacccttcttcatcatgaagaaaattggttggtagacttgtaattattcatctcagacatcactttcttaaatactagtggactaagttcagttggttttatggtccaattttatagatcagatcaagtcttttataaagctgctccctcaaagaacaatttctaatctaacttaaaaaaaattgacttgcaaagtatacacacaggttgctttgaaatttcttgaagggttgcaagaatatgctacatattctatctgtcttgtctcgtttaattctctcttctctctttttttttctttgaccatggctaatacggcatcatttagttctcataaccaaccttgaatggtagttgtatagagtaccaaaacttcttacttatttgctgcttaatttccaaactcttaagcccatttgttcccagatacaggtgaccagtgctcagaagataactgtaggttttgataacatcggctctaccccaagattcttttcaactctaaacattatccaaaggtgttagtattttttcatcgtctaatcgtaaatatatatataaaagaaagacactgctttgaatggcacagatgtagactaacagtagttcagccactgagactcaaatgattttgtattaccataaaccccatctgcctgggcaggcagaattgacacaattttgctcagattggaacctagttcatatctatgaaagaagaccctctttgtttccattttatagaccaggaaactgaagttatgctgttaatgaaaggtggagccttcagttaagcactccagggtatgtactcttttcctatacaaatgctcctctacttatgatggggtcacgtacgtccatgctcctttcatatagagtaaatacattgttagagccacttcagcaggaaagtttcctttcccttttttgcaaaccatgagaatttgcttcagattgccttgattacagttttactatttctttgcaactgcaggccattcagatactaacagtctttctttaacattatatttttaggtaatttgaatcttcctgacgagtccagtgatagttgatcacttactatttgtattgatttatacatatattcatagcaaattcttttcttctaaaagttacataagcacaggactgaaaatttgtattagagaaaggaaaaaaaccatcaccagccattattaacatttggcatatcctgcacccatgcttttttttttttttttttttttttttttttgagtataaaaaaccattcttgggctgggcacagtagctcacacctgtaatcccagcactttgggaggccgaagtgggcgaatcacgaggtcaggagttcgagaccagcctggccaacatgatgaaaccctgtctctactaaaaataacaaaaaattagctggacgtagtggcaggcacctgtaatcccagctgcttgggaggctgaggcaggagaatcacttgaactcaggaggtggagtttgcagtgagccgagattgcgccactgcactccagcccgggcgacagagtgaaactccatctcaacaaaaacaaacaaacaaaaaaacagcaacaaaccattctttaatcattctatttcagcagtttatgaaagctaataaaagtgtttaaattgacaaacagcttcagtttacagaggaaagagcttcagtttacagaggaaatagctcatctattcttagcaaatatttagtagtgatcaacatgatgagaaatataggaaaagtaagaggcagtcttgcttttgaaaaaattgatgctgaggaaatatgactacagactcagtactagcaaccacagggactgctttacagaggaggtaggacttgatctctctgccttgcaggaggatagggctttgagtggatgtgtggtggaaaggaggcacttcttggctggagaggatggcatgtgtggagaaagagcattctaagtttcaggatttctaagaggagaaatggaagttcatggtgtaaagggtgggctcagagaattatgggccttgaaaatcaggagagtggttttaatgtggaaaaagaatgtctaattgtgccgcagagggaatggatcagggtggctacccagttggtttgatggcattgagaacggggtgaaatggtgactgtatgacatttgaaacaaagaaatcagaggaattagtagtagggcctgtgtgtggctgttcccttgcttgtgtgctcttccctcacatacctgcatggcttcctccctcacctcctgcaagtctttgctcagatgacacctttttctcagtgaggcttatcctgccaccttttaaaatattgtcatcatcctacagtgctttccttctctgtaacaataccttctaacatactgtatttatttacttatcatatgtacttatttactgtttattgtctccttcctatcattctatgctttgtgaaagtggatgtcttcgttttgttcactaatgtatctcaagtgtatggaaagtgcctggtgcatcctaggcactcagtaaatatttgttgagtggcagtaggtcttagctgtaaagaggtggagtacagaaattcagagtgactccatgaaagaaaaaagaatgactccaagcttttttaggctggataatgcctttaacttaatgagtaatttggcacgaggattaaggggagacgaattctggtttaagcatgttgagtttgaggtgaaggtagccaaataaaattgctcagtagtcagcaaagattaaaaaaaaatggaacctagttggaaatgggagagcaccttaagcaaagaaatggctactagcatctagcattcacctcatattctctctctctctctctgtctttctcttttgggggtaggaggattctagtgtcctaaaacgctaccttaaatggagtttttatttagaccctgaagtcctagcttgtatctggagtcctggtccgtttgctgggatatggttctttcctgttttgcaggttcatgctatttttcccccacctctcttagtaaagatgtatatattcagaattacttgtgatcttctggttgtattgaaattaaccttcagacagtgctgctttctctgcagtaatgcgtttgatcttttgggagtgtggttcttggctgagataaaagagaggaagtttcctgcttgcggcctaggcctcaggtcatggttgctgatgttacaggtgtcagctttactatctcctggagctccctgatggctatccttttaaatgcttttcctgttgtttttctcaatgaaccaaacactggtgcagttgtatccctagaccatctctctttttctatttggattgatctaacttaagtttttctttcagttttgaaggcagattaaattcatgtgacttggttgtcagaaatttaatgaaatatttgtttataggagtagtatataagcaccaacatatctggctgtaattagagtctaatcagtgtatctgtgactcacttttcaaaagaggatagttcctaatttacctgatcgttgtgaagatagtgtacagtagtatttacacttagtacatagcctgacaccagtaggtgttcaataaaggggaattattatatatttaaataagtgaaagaatgtcttctgaaagaagaaatacatgtctgtgtaatgaagaactagaattaattggtagactgaaaggcagaattcagctcaatgtaaggaatgactctctaccatagctgtcaaaatggaacattgtaaggtagtatgttccctgtcaccctggaactattcaggcagaggctagataaccttctgtctgagaaattgtagaaggaatttcttacattaggtaggaggtcggacttgtttatctctaagctctgtttctcctctaaaattctgtacttttgggcataatccaagcttccttgcttactggttttagccaaatatagtctaaatatccctaggattcatggcttcaagatgagcagtatcttgttgctcctgtattatacgagaaaagttagtttatccattgattggcttttattttggtcattttccaaaaaaggattttggaagcttgaaataatagcaaattcagtaagaccaaatctactgaccacaaaagataagaatcagtaagtcaaaaagggaaagaaaaagagaacaattatccgtaagtttagctgaggaaagctttagaagttgaacacaatacttagctctgagttttctggtaaccaaggcaagtaaggaagactgataatttgcatagatctcattgcctatcgagaattcatgaggagactgccaccttccttaataaagtggagccccaaatgccaagattgtcatacagggagaatctccaagtggtaaggggttattgctggatctggcaataatctgattcttgttctgaggcttcccctttaacacgtattgagggttcaatttagtgctgctgcctccatctttcttctccagtttaagtctctgatccaagtatgaacacattagtctttccctaatgccaatggaacagctgatgtaaggctaggacatttaaatcaagctttgctaaaagctggaggataatgaatagagagcaacatgaaactatttagtctggcttacaaagacatttttctcatgcccttatcttttggtgtgtctccatttgatacacttcatcagagtactgctaccaaaggcagagccagacatttaccttcaaacaggtgcaagtcagtaagatccagagtgtctttgcttgggtttcttgtttgaagaactgcttcatttctgagtaatggacgttcggaatgattactttaggagagaccacacttatctgagagtgtggccctactgtactggtctcacagtaatcccagtattcatggaaaagataggcacgtacattagcatgagggcattctgtggttagaagcattctgatttcattgggaaaaacaagcttctctctgttcttgagcagaagcttttatagaagtctttgtacatgggccattgaaaaataaagtgaacaattcgggtttatcactcatgatttgtaaggattcacttttccttttttctgcagttgctgtactacttcaggtctgttccagtgtttccttgttctcaccaccaagactgaacctccttatttttgttcatttgcttcaggaaaaccattccatctagatttcctaggtgtaaacctcactgattacataatagtgtatatttatagttctaggacaccttcttcaggcatcctgttacatttctacattataagattcttaaatatgcattgaattacaaataggtccccagggaaaaggcaaaaacgaatggctttttctgcgagaaactaggactaatatagatatttgggagcactgaacatggaggatagagttaaacttgaaaagacatacagagatagaaaagcagcaactgccctttcatttgtatgcaagcacacgatatatgtatgggttttttattttttgcttgatgtattcatttccaaatcaaactataatgtgctctaattgggtctctttgttcagcacgtggttgttgatttgagtactttctccagttgaaaaactgacattttaattttgttattcaatgtgtgatagatttaaataaaaacacccaagattgtgtattgtagatttccttcaacaataattatatataattattttatcaaaataaacaagttaaagtagttttagttattttgtctcattttacatttgggaaaaaaattacaaatcaggggccagagtctggtcatgtttgtcagtgaggaaagacaatttctgattgccagtcccaccaaagcgttggcagattaacacagcattgtagattactttcctaggaagagatgctccttttttctccctttccattattttgctttccttctttccatggtgcattgtccttttgttttcttccctcttatttcgatgcatgtataaacttgagcctttctgctctcacattctttctccccatgatcataattgtttcttcactttattcttaaaaaaaaaaaaaaaggccacataagtattttatgtagatctcatctatcatttaagttttgtcagatccagcctgctcttgccttaccatgggagaagggaaaggagggaggagttttaagggattttaggcatcaggcagaagtcttaagggaaaactctgcgaggaccaacaggctcagaattagctgtgcattgcaaacagatggtgtgtccctgaggaaatagcgtagttgccctaagcaattgggtgcttccatctgatttagcttagtctctgtaactgggaaaaaggaaaatcttatggaagaaatgagtataatcacctgtgaaccattctaaactattatctagagactagtgattattgacttacatatagatttcataattctgcaagatagtcttcggtgttgtatcatcagttatccaaggtataaataacatcaagacccttatgcctctgagcctgatagatccttatcttttaataaccaaccccccactttcttcagtagccatgatgctactgtatcaatgctaccagcaattggaaacccatattcctaatgccaagtctcggcatgtagattttgaggtctgaaaactttattagcttggttacagtacatctcaagcctaagttttcatatacacatagtttagtctcaaagggcaaatgtttccctgaaaggagttcagtcaacactagatgcttatatctttaggctccaagggagtccaaaatttaatgattaaaaatattataaaaatgcaaatatagaaataatacaaaagctccttccttttggtgggcttttctgtccttgcttggttcaattcagctgtgttcttctaggagactgcaaccacaatttaactgctttgctttggtattttgtttgacaagggagatgaatgtttcagatgagacggagtctcactgttgtcacccaggctggaatgcagtggcgcgatcttggctcactgcaacctctgcctcctgggttcaagtgattctcctgtctcagcctcccgtgtagctgggattacaggcatctgccaccacgcctggctatttttttttttttttttgtatttttagtagagatggggtttcaccgtgttggccaggctggtgtcgaattcctgacctcaggtgatctgcctgcctcggcctcccaaagtattgggattacagcgtgagccaccgtgcccggccttcaattttttgctttaagttagaatcctgtttgcttactttttctgacccaaatgttttaaaaatgttttcctgtgttttcatttaaaagattggttttacctctcacattgagatgtatctggagttggttatttattatggtatgagatttttattatttttaaaatacggatatctggttgactcagaaccatttattggtaaaaccttttttcccccagtgtacaatcaccttcatcataaatcaagaggttgtatatgtgagggtctgtttctctgtaatctctgttctgtttgcccatttgtccttgtgccattaccatactgtcttaattattatgatgttaggagtcttgatatcgagtagtgttaagtctttcaaagattgctttggttattcttgcgatgttgtttttccatataaatttcagaatcaacttgtcagttcccactgaataaaaaaaccctgtggggattctgatttgattttattgaatctacagatcactttatggaatattgacctctttacagtattgaatcttccagttaggaacttgtcacttttctccatttataaatacattttaaaattttattttatctcctttgtaatttctatcaataagtaatattttttaagctttctctgcagaggtctttacctgtcttttgttaggtttattcctagtttttagatttttaaaaaacgttttctatttattactggtttaagaatgattttttaatttaattttttttggtatagtgagtaaccttatattagtgaccttgctagattgactaattgattctaatagttgatctgtaggtcacttttggattttccatgtacatagttgtcctctgcaagtaatgatagttctgtgtctttccagtctatcttccttttgtttatttctgacttactacactcagacttctaatacaatgttgagaagtagtgatggatatctctttcttatttgtgatttcaagggaaaatgacagtcatgcaacattaaatgtaatgcctacttttatgccttttatttaatctgattatttcagaattttttttaaattctgcaatttactgaaatttttaaatatcatgaatagctgttgaattttatcagtttactaagatttttaaaaatcatgaatagctgttgaattttatcagtttttttgtttttgtttacatcacctaaactgccaaactcccttactgttttctttcttttttttttttttttttttgagacaggatctcactctgttgcccaggatggagtgctgtggcctgatcatggctcactgcagcctcaaactcctggggctcaagtgatccttgtgccccagcctcccaaatagctgggactacaggtgcgtgccaccacacctggctcaaacttttattttggcatcttttgtacaatgtttttgtatatcctctacctaaaatgactttcctttcttcactagctttccttaagtcttagtttaggtgtcatatttcagagaaatctcccttttctgtcctctgatctgtgcactttgcatcatcatttatcagtggtgtgttctctgcattgtgaatctgagggcaggaatctcaatcctaattatctctatcctcctaaaggttttttctttcttcctacacaggttacattcactgttgtgttctgagaaaaggtgttcaggccttgctttctgcttctaaaattactaactgcccaggaccatcagttcatttcttcaactgtggctccaacagatctttcgctgtttgctggcccaggtattgctctcctctgccccgagtcaatggcagctgggagtggttaccacttccttctcttaccacagttccttctctaccacagttctgttttgtatgtcattcccctagcccaggatgatcagccactttcatttacgttcattattacaccttattatctgtgcaaccaagccagtctctcctacagccactcgtgctttccaaagggaaaggttgaaattttcggttttgtcctacgtgaggggttgtggggagtaggggtggaaatcactgtagattatcaagtaatcctttttttctttgtgtacttttggaataaatctagattatgttgatgtaactgttaggacatttctgtttcttcatctctaaaggagctgggatctgatatttctgttcatattccttccagcatgaacattttatggctaattagatattaacttatttattagggatattacatatacacactgggtgtgtccctacactgttaatttgggttggaactgaaaatatactttctgtgtgtgcctactgctactgtagtgaagttcttgagccaggtctgttcagtcatattgttgaaaaactgtatgaatatttatgaaggagaaagagctgataggtaccatgaacattcactgttgtatatgcatatggtttatattgtgttctgtgtcagtattgcctaccagagctgtctcaacattagctctgattctctgtctagcatctagaccagagactggcacgtaataggagctccaaagaaatacttgttgaaaaagtgcataaactaatttttgaacattttattatgtgctgggcactgtgctaagtattctatgtatgttatttcattaaccctcaaaccttctgagattggtactgtttgttagtatgttataaatttaggaagtaagttgaagaaatttaggttcaaataagttaagtgacttcctcaggattactcagtgcctgactggcaaagataggattttaacttaagtttttctgtctctgagttccatcaacttaactaccatatccttataatacctacccactagtcaaattaaaatctaataagaaactgtgtaaaagcatacttagattgagaggaaataagaaatttggttattgttttagcactcacctttagacatagaagtttctccatttcttttcagggcctggggtaaggcaaagtgtgcacatctgctctgtatattaaaatatcccctcaactcattgaagtggaacaaaaacaaggtcacttgacaggactgtaattgtaatcacactatacagctttacttcctgccctttagtagtaggaccattcccttgtccttaaacatgcttctaaaataccagttttaatggctatatagtctttcatttatgattgtataaggattcattctgtcattgtattgtcattcacataggttgttttcaatcataaaatactgtaatgaacatctgcaagtttagatttttgctctcacctattgtttcctcagacaactgtaagtagtagaattgatggattaaaagatactttttaaaggctctgactcttctaaaatgtgttgttaaactcctcagatctgctaaccagatctttatgctgtacttgtgtgatttatttcgaatctaagtgaaagcctttgtattagttaccctgttaaatcccatcttgccatttgggcagcctattcttagtgtgttttctctgatatcagttaacattatattggctaattccatagaaactaggagactggaaaatgaagataatgtggaaaaacaagagcttgtgaatttgggagtgccctgttcttttaagatgtgatgtgggttaaatgataaacaatgcatcttaaattctttaaaagtggcagaagtaaatggaatttatctggaaaaaaatcaggcgtttattctgatgccctaaattcaggggtgaaatattatctggactagaggaaaattttatgtacattatatggtgttctctattttgacaagcttactttgatattactgctgcaaggtagccccaggagggttgaattgagaagaactgagtattttgaggaacaaaacctaggatagtaggctggagggaattggaggtcagggttttagccatgtatacagagataagcaacatatttaataaaaagaaaaggagaatctatatagtatgctttactccaaagctggatgagggagaaaagaggacacgtctccttgagaagggggcatgtgttgagaatggagaaaaggggtaaggcagattactcagaagaactggggtagaagaataggttggatgataaaaggggctgacattagtccctgaaagttttttttaaataacttccaacttttgccttcacctttgccagcagtgatgtgatctgctttcagctgtagtgaagcaaactgcataaaggacattgtgcatgttaggtcttttacttgcctgttggtacatgtttgtaatatttggaaatactctcactgcgaagaaaagtatagttgtgctgtagtgggtagggtgaggaaaataagggtcatcaccagcaaagtcagagtgatgaaaaaactggattacaacactctgcttgactttgcatagataagtaagccaagcagagtgtttcctggatgtagttaaaatacaagcttggagcacaggtaaaaggccaagaggcttggagatgtacatctgagatgtaccaaagggccaagtgcaaagtaagtttgggaagtttagtgtcatataaaaactaataaagaaagggtggtactctgtctcatatcctgaaacgttttgaaaagaatattgaatttgaccagaagggcattgctagtgaatttcaaagagagatttcagttgagctctgaactggaggaagatgggtgatagaaggctggagagggccagtaacaagggttgaaaaaggaaagagtattcaagcgtatgcataaaaagactacgggtaggttgtgtagatgatgacacactaagcctgggaagacaaggtttcggtgctaatttttatttctttaacaagggtgatagaaatatctgttccatatattaatactatacacaactgtttacctctcagcttttctagcaagacatatgggcttgtgaattaaccctgggtagccctggcattagatagaattaatagtgcttccatatgtgacctcgagacgtactgaaatgaggcaaccaaggaaatcctttatattgggaccaagagccaagatctcaacttgggatatgttaccccgagagttgttaccccgatactataataccatgaataataaccccaagggtcctgttgtctctttttcctcatgtcacttcctttggtactaactgtcaccatgctaacatctgcaaactttgaaaattctgatttattctgcaatatttggaaatttcactgctagtaattgtatttcctggcatggttctgatataattttctgtgtacacagtagcttttccttttagtgctgaatcacactgaaatccttgtttaacctaagttatagttgcaagggagctatcaagacaaataattacagtgatggtgaagtgaatacaagtcaaacatcccaatctgaaattcaaaaccttttgagcacaccaacatgatgccacaagtggaaaattctgcacataagtacttaacatgacctttgtttcatgctcaaaattatttcaaatattatattaaattaccttcagactatatatataaagcatatatgaaacatgaatgaattttatacttagacttgggtcccattcccaagatgtctcattatgtatatgcaaatattccaaaatctgaaaaaaatcccaaatccaaaacacttctggtcctgagcattttgcatgagggatactcaacttgtaatcttttctatgtatagccaagtttgcacatacataggttacaacaacccatcatgtcttaacctttcagtctggaggctggagttttctttttactttgattgtaaattgtattcagattttagaaatgtaaagcttagagaaatgtgcatctcaagattaagaaagctatgcccactgttaaagactggggcatggaaacaaagttggacagtgtagtagaaaggtcctaaacaggggatttggttcttatttttgctatcaagcagaagagtcaaaactgtaggagtctaaaccaaatcaggtccacctgggagtctttaaagttcagggttacttagcatggggatagtggtatagcaaatagttgcgtaggtttcactcgtgggctggtgataatatagtgaggattcacatccgcctgtaatctgggtagaatatttgtataaatcattttggttttttggttttctttttaaaatttttaaaattgttttgcttttcttaagttttggtttctacattaataaaatgacagaactgaattgcctagatgatattcaaagtttcatgtggttctgttagtctgggattctacagtggaattttgtcactacttttgggaagaagtttacctttggtggcctacgaataaaaaccacattggcacaatgccatttatcatatgggataattctgtgtgtttatataatcatttatgttcgtttccaaatgtgttaataaagtacagtatctcatttgattagctcagatgatgaaataggtcagagaggtattatgtttattttcctgatgaaataaaacatcgtagttagcatcttgaacaatttaaatttgatcatcttacttggtatgccagccactaaggatgaaatcctgccactgagaaagaaaacccagtcaggaaagctttctcacccttatctatctaacaaattgtacatattctccaagttctgacttgaatgctggtgaagcttttcttgataatctcttctaccgcagcagagtagaaacactttgatcattcttctcaggactcaggattttaattatctgtttaatgcctttcccttccaccctagtgaactactcaagtgcaaataccttgtcttactcatctctgcacctcatagcccacactgtacctggcatatagagatgcttagtgaataattgcagaattaaatgaaagagtcaaggtgatgtgttgcagagtgaggagaacttgggctttgggctggcggaaggaggtgtcttcgtttacgttttttagattgaaattttgccatgtatatgcgtttaaaaatttaaaacctagttgaataaaaggttggggggggcagtatccaggggccaaatctatctattaataaaataaatttgaattttttaaaaaaatggcaattaaaactcatgttcatggaaaaaattaagttcttattttagtttttccctaaacgatcttgccgtatcacataacagcagtcttgtagtcaatcaagactgacttcaagtggtgaaatggaattttttaattccctgaagagagaaatctttacctagttaagctttgtgttatcttgatgtttttatttgtctagtgacctcttctgattgaaagagtagttaagaaaaaccctttagtactgactttttcaaatttaccgtaatgtaatgacctctttgaaaggagaagtacagagtgtatttttcataatgttacttaaattctgtagacatgaaactagatataaaacccttatgttcttggctcatacaccactataaaccaaatctgcaaattaaatacaaagacaactacaaaaaaaaacaaaattcaaatgaatacaattattccatgtgacagatgatgtttaggttttgcagtagaaaaaaatagctttaggtctaattccattttaaatgtgtttctgtattttaacttcagtgataataaaagctgtgagtagtgcctcttctcatcagtaatgttatgcaggagggcattaatgacttcaaggccttgttggtaagttcaggatgagacatcatacctaaccaaaacacttgacagcaagcattcctcaaatacaggcttataagttttactgagatgtcatccattttgttcattggaagataaggttaatatcttgacattattgaaatcttcattaaatgattttctaaaccagttattgctggaaatgagaatggaaaaacattgcatacctacaattatatttactgctaacaaatgtttgcaaattgtactacacatgtaggacccatatagcacttgcatataataaagtacatatatggtattggctgttaggctattggcttttgaatatgcatgccatgcctgtattgccatatggtcgattcaaattccctttattttttactctttcttttacaatgaccatgaaacttatgctgtgtgtagtgtgccacaaggacatttggcctgaaggggatcttcacacagctgaagaagcagcagtgaaagcctagtgccagtgttgagacagtggctactcatgatcttgaatgtttatccttgtttttagattatctttgaagtgaaaatatgttctcaaaccttgtacccaacttatacatcctttttttctcccagcatatttgggagacattgttttagcaaatatttttctgatcactatctaaggagccaggattcagagatgtgaaaaacaaaacaagcttggcccttcctgaggcaatgaaagaccctttaacagcaagctataaatagattgatttgtgctgttctaaaggtatgcaaagagcactatggaacatattgaaaggagataccaattattgtgaaggtaagggcgaggtttagagcacataatggcaaagatcctgttgaaatagggtcttaaaggatgagtcagataagaagataggtttaaactagacagagagatggtatatgtaaagaccaaggtcatgaaagacattattattataatggtgagaggtgtgtggccctagatagcatttgccatgtgagaagtaaattggaaccccaaactaaaagtcttgttaggctaggtgtttagcccttatctcatcagcataggggagccatggtgatctgagaactgggagagtattcagggcaatattttttatgtatagcggttaccacattgtattacagtgttctccttcacttgtcattggagctcttcaagtgctgtgaccattagttattaatctttgtgtgctaagcttttggtagagtaactgataaaagtaatgcttagaaaacatgggttgaatgactaatcatgagtaaagaggatttaggagagaattatgacaatgtccttcggtggtagttttaatgctttgtgggtcacagactccattgtgattgacttggaaagcttttccttgaaaatgtaaatacatataacatttggcttatagttttatgggattcatgtacctctgaagccagtccatgaattcctggttcagaattcctccttaggaaatcatacccagacagccatcaccatcacaccttgtcatgaataattactgtctcttttagcagtctttattacgattgtgtctctttcttgtcatttccttgagtttctttcatacttaggaagcaaatagctgacctgtctatgaataaagaaagcgtttttaataatgattaaggtaaaactttactggtctgtaaagataatagacaagtatgtgaattaagccagcaaccaagaaacagctacttgagggagaacctgacattcctgaatttgagttgagcaagtgagttgggagtctgcagggccatcctcagacttggtttgctagaaggactcacaggactcagaaaagctgttacagtcatggttatagtgtattacagcaaaaccatacagttaacatcagcaaaagcaaaaggcacccggggtgaagtctaggagaaatcagacacaggtttccaggtgtcccattccagtggcatagcatagatggccttaattctctcaacaacaatgtgtgacagcatgcacgaagttgtcaaccagggaagttcgcttgagccttggtgtccagggtttttactgttggtcagtcacttaggcttgcagcatctgcatgacaggcttcagcccctcagacttctcctacccggccccccagcagtaataggtgttcactgtaaatcacattgttagaataagctgtctgacaaaattggtaccatgtgacccaaggcctcaggcatacagaaatattcttatcagggagaatattccaaaggttcagagctcatctaccaggagccagccaaggccagttttgaagacaagtctttcttgggaatatgcagggtttgagcaactcagtcctgctgagttaaccctttcttgtacagcaagttagctcttcagggagttagctctgtctatcctgcccctgtctgcctagccactccttttctaggtagagtggaccttgctgttcacgtcatagatggccattccgtgtacctagactcctttttattcctttgccaacaagtaattggaatgtttggatttaagaacatgtctgtgctttgcaatttcatgtgaccatggtgaaattatgcacacattctatcattgtgattcaacaagtattttttgaatgctgctgtgcatgaggcatggtgttagatggcagattgacagaaatgactaatacaggtatctggcctcaaggagtttacagtttcataggagaaagaaaaacaaaactagcaattctggtaagcagtatgtgttttggagagcacttaacttcatcagagagcatggttgaaggtgtatctgtgtgtatgagaaggtgttggtgataattagaaggcttccctaaagaggtcactcctggggttgagccataaagatcaagtagatacaagtgggcatgaagctagtattttgctgccagtcatttctgtagttaggttgcctatgtggttggagcatgtatgtattgttacaggtgtagtctgcttggcttccctaagagaatgccccagtcctggccagaatatacatgtcttttttagggtttgcaccaaggggaatagagagtgtctggctcagtacaaatctgtttccgttactccattatccagaaagccactgaaatggcattagcctacacttaatgggtggtagtgttttcacacattgcttctcaaaggaggagtatgtgaatgtttagtttgggcctggtaaaaaaaaaaaaaaaaaaaaaaaagtataaccattacaaatttaaatgtactttgtttctaatgggaaggcaaatgcttgccttgctttgatgaaattgaacataacaaaatttttctatacttggaagcaaaaaacttcaggaaaaaacctgggtccaaatgttgctacatttccttgggcttccacgtgtatgtggttcttaatataatttgaaacttctaagagcaacaaatagttgttttttgcttctaagagcaacaaacagtgcatagaaattgtgtgataataggatcaagaatgtattattagagtgaatattggataatttcaaactgttaaccttgagattttttctaagaatctttctctttttccagcgttacagtgtttctgccacctctgtacaaaagacaattttacttgtgtgacagatgggctctgctttgtctctgtcacagagaccacagacaaagttatacacaacagcatgtgtatagctgaaattgacttaattcctcgagataggccgtttgtatgtgcaccctcttcaaaaactgggtctgtgactacaacatattgctgcaatcaggaccattgcaataaaatagaacttccaactactggtaagttgtataaaatttttttcctagatactacaagaaaaactcttcatactctgtgattttagaactggaagggatcataaaaattgtctaatccagctcattccgtttagaggcaagaagtgacttgtccattgttacagacttataagagtaaccaagatcctgcctcctgggtatgtgttgtttaagaaggtggttccagggtggacttcctctgaggtctgttatacctaaaaggatagataaaagcaaactctgacaaagcccacaacaacatcttcagattgtctctactttgttctcagagtgaatttcttcttccttgtataatgctcctatcttttaaagcaatcacagtcttttaatgagtggggattcagagcagcacttaacagtctagatgttttcattttgtaatttcagcttgttttatgatctttttgcgtaaattaattatacatgatttctagatttttggtccttcacctgtagtttacatttaaaatttcctggggctgggtgcggtggctcatgcctgtaatcccagcactttggaaggcctgaggtgggcagatcacttgaggccagaagttcaagaccagcctggccaacatggcaaaaccctatctctactaaaataacaaaaattagctgggcatggtggcacatgcttgtaatcccacctacttgggtggctgaggcacaacaatctttgaacctgggaggcagaggttgcagtgagccaagattgtgccactgcactccagcctgggtgacagagtgaggctctgtctaaaaaaaaaagataataaataaataaataaaatttcctggcagaaccagcagtttgaagacttcataaactttttaattttaagattccggtttaatatggaagtctgagcacatgtatttaactcttacctctttccccagatcccaaaggaatataaaaatgagggcaacctgtattaatgctagtgggattaatggtagaatgccacccacatgccagcacttgtgaggaacttctgcaatttacagtacagatgacaccagactagtaaagaattgactagccatataagaaaggttagtcatcgaaaagtccagccaataacttagacaaaggatttggggggtgaggttagggtatgggggcaaactctcagttcccttttaggaagcacctggcttcagtgctcagaggagcagacacagttgctcactctccactcaaagttggtccaggccttgtgctaattaaaggaggaagcactgctgtagcgcagaaggaaaaggccagtcctccacctgttcagcatgataatgcagctcccctgtggtaagggttggtcggactacaatatctttgtgactttgatgaaagcatctgcagttataatgtggcaaagaaaaggataattccagaatttcccatttccatcatttgagcttgaaatatctgaatagatatttacaaaaccttgtgaagaagtcaccttatttctcatgtttctaatgaacatatataaacttctcatttccagctctaggataagcaaacagcaaaaaattaccaatgaaaagttaggagttcaaaagaagtagtctgaactagatagattagatgtcatcctgtgaaataggtttaccacatgatagggaagaactttcaaacagtacagggtctattttcagttattcactatgaaatgagaacatttcacagttgttaaaggttgctttcagaagaaaagcccaactgatgaatgtttttaaaaatgcactattgagagcgaacaacagactggatgccataattttatagtcaagtttgggacaagttttaagaaactgtgttacaattcagagaaaagacagttggtgagcatattaagagatatagggaacagatttagatgatccaatatgcttattatcagaattccagaaaaaggcatgaaatcataaagaagacagaataccaggcaaaattaatgaaaaaatattaatccaaacacatataataaaaagtatcaatttcaagaataaaagaattatataagcatttaacacacataaacattggttacctgtaaaaggtgaaaaaaaaaaacaggttcagattttctgcttaaatatcaaagggcaaatggaacatttttacgatcacctaaaattcttgaaataggccaagatttttcatatacaaaggcaacagccttcttgccacaactaagttcagtgtacaagggtgcatggactcttcctgaaagaaattactagaaataggattctgtatgataagagattaatctactgaagatcttaagaatgggaaagatgtgatatgaaagaaatggtggtaagcagtaaaccagtaagactcaggatgaatgtcaaaataattgtaattttctgaaacaaccagaaaatcttaattattaatagaagttacaagaaaatgatctggacttaaaagtccaggaggttaagatagtataaaaagtatatatatgcaaactctgttaaaaaaaaaaagtaaaagatatgttctgcctttaaaaaattggtggacctattggccgggcatggctcatgcctgtaatcccagcactttgggaagccaaggtaggtggatcacttgaggttaggggttcgagaccagcctgagcaacatggtgaaaccccgtctctattaagatacaaaaattagccaggtgtggtggcacatgcctgtaatcccagctacttgggaggctcaggcaggagaatcgcttgaacccgggaggcggaggttgcagtgagccaacatcataccactgtactccagcctgggcaacaagagtgaaaatccatctcaaaaaaaaaaaaaattggtggagagatatatactgaaatgtgagttgtttagaagtgatgaagatgtatgtggttttttttttcgcttgttttgatattttgttgttttttttgttgttgtttttcttgctatgagcatgtactggccttggaacaagaagacaagccaaacattaaaaaaaatatgatttttaaggagatgttaataggtattgttacaggttattggtattagtgacctgatgtgataagtggggaaggtcctatgatattggcggcagttggccttgtaatgatggctgaagaatacaggagtaagtgggtgctgacagagctggtgtgcataaaaggaggcctagtgggagaagactgattcacttgttctgggtttgagccctgtaaactgctgtaatgaggctctttggctaagtggtggcagtggccagctgcaggaattgtgtaggattgggaaaatgggggttgccacctacagtgtttttgtcgttgttgatgtttatttcactcgaggccctttttcagtaaagtcatcacctggccttggtcctgtggaactggcagctgtcattgctggaccagtgtgcttcgtctgcatctcactcatgttgatggtctatatctgccacaaccgcactgtcattcaccatcgagtgccaaatgaagaggacccttcattagatcgcccttttatttcagagggtactacgttgaaagacttaatttatgatatgacaacgtcaggttctggctcaggtaacataattgtttctcctttttcctaagacatctttttaaaattaagcgatacttattttattagttttctaataagccaacttgctagaatgtgagatagtataaataatattgcaggtttgaacctaataaaaatctttaagcttgatgtatatatgactgtggctggtttaaaatagattggaacttaactttaactgttaaagcgaatcaataagtcagctccatggtggtataaatttcaaagcgttctcacttgtataatctaatttgcttttcatcactgtgaggtagaaaggataagaacaattattctcatatagatgaagctgaaggtcaaagatattcacatgatctgcagctaacccattctattcaggattgtttagcagcttgatgtttacatttgaaaacaggcatgacagaaatgtattcagaattgtgaaggttatttactttttaaacattatatgaaattgtctttcgtataggcctggttttttaaaattaaactaatgaactcttatgtcattttctcacttgagaaaaatgtctaaccaccttcttatttaatgtagttttggcccctaatgacgttttcttttctcagttctatttgttgatatttgtggcatcagaagtagatgagctaattgtcagagtcatcccaaggtggattttggcatagcagtgcttcatgtttaaactgaaagggggttatcttttactttttcttgcatgtggtttggaaaaatattaagagaggaacactcctatcccctgtgtttttagaatttgacacttggtgaagaataaatagatctaggtttcaaggcaagctttgtcattgattggctgtataaccttggttagaacatgtttcctctttgggcttctgtttcctcatcaaaaatatggaacccatactgttgataaaaacacttcaagtggtttgttaagacttttaaatgagatgtactatcctttgaaaagtatgagtcatcttcaaataagggctaaattcatgaataaagtgaaaatttgtaaagcgtatataatgaaaatttcactaattttggtgaaagcccatctctattaaaaatgcaaaaaaattagccgggcgtagtggcatgcgcctgtagtcccagctactcgggaggccgagacaggagaatcacctgaacctggggggtggaggttgcagttagctgagatcgcaccactgcactccagcctgggaaacagactccatctaaaaaaaaaaaaaaaaaaaaattttcactaattttataattgagtgatattaaaggaatgttaaagcagaagttgtgactgggtaagaatataattctgaagcataaaatcacatctaatgttgcagaaagctcatataatgacaaatgtctatttattttaaggaaatgaatatatattggtatgtatgcatatccattcatttaagaatgaagaaactgattttattacctgaattattcttctatagaatttggccatatgtattcaataagagagctctctccttgactactaggacacacacaggctcgcactggagctcacgtcccagaaggcaagcttagggattcctgaaacagttgtgcaaggaagacaatgagagtttggacttagatgaagcagtcttagtactgaaggtgtgatagtctttaggcaggcctggtggacagaggttattttagagctttcctgggacttcccatttattctcagttcagatcttcaaaaagattttgctcattctggaagtcatcctgctcaaaactgtgataatcaaggaccagagtcacagaaaatcaggatggctacagatatttggaattaatccctcaaacctgttctcttgtttctaaacttatactccggaaagacacagcactcatgccacttgccacagtggaataagcccacctaactgattaaaggaattggtgggtgggtggcagttgattactggataagaatatcttcattaaccttttaagatataaacatgagaaacaatggaataattctgtttccattatatatatatatatatatatatatatatatatatatatatatatatatatttctagatccatgagggaccatagctctctgttctctgaaagcttctctccctcctttgatgccttaccctgcaaaaacttgtctgcattgcttgctagctctgtggctttgggcagttaaccaatgtctcatgcttgagttatttcatctttaaaatgaaagtgatggattctgtgcacatcattggattgttgtgagttcaagcaagacaaaatgtttgcatgaaagcacttggtaaattgtagagttatgtccaaatgacaagtgttactcttattgaaaacatacttggaggaaaaatctaacatacagtatcagttgaccacattgtacaaaacttagtttaaggcctcctttgcctgtcatagttcattgtgtactgaattccctccaaacctatccaggcagaagccatcttctggtgaataatagcagaaaatgccatctgtttcccttctattcattataaatccttaatgccaccttaggcatgagactagtgcctgtgaataagtaaactgtgtgtttgtaatactctgtttttagttctttcattaattgaggaaaaggtataagcatttcacattctgaattcatatgtttattacttagtaccgtgaccataattaaggaaaggccctgtctctacctctaaagactgtgcttttaacttgggaacttcagggaatacaatgaagagctgggttctggcagctgtacgccaagtgtgtgagtgtgcacatgtgcatatgtgccagcttttgtaagtgagtcttctaggccagtgtttgttatggcgtgtgcagcttatgagctcttgtaatatatgcatgttgttcgggtcttatttcctgttcactgcatgtaaagctgtggagtccctgtttcccttttgaagttttctctcaaacagttctaaaggtacagaagagtagagcagagaatatagagatctaaattaggcctattcagttttgtctttagaagaaaattgttactttttttttttttttttttggagacggagtttcactctgttgcccaggctggagtgcagtggtgggatctcagctctctgcagccttcacctcccgggttcaagcaattctcctgcctcagcctcctgagtagctgggattacaggtgtgcaccaccatgcccagctaatttttgtatatttattagagaccaggtttcaccatgttggccaggctgatcttgaactcctgatctctagtgatccaaccacgtcggcctcctaaagtgctgggattagaggtgtgagtcactgtgcctggccaattgttaactttttaaaaatgctcaactattcatgtgaagtaatccaatatagataatacagtggatcaagatttgctttttaattttaattgacatctagaatccagtgataaaggggaagacaaaacctttcctcgtcctgttggcctttcttgaccataccatttacacaagtcctgaacctgtcaggtgttttcagaatttgtgtttgtgattcctttttcttttttattacttgtctttgcaatttccagattagtctcctgaaattaactcttaagtgtacttttaagtctgtggtgtggccctctacaaggctttcataaaatgtaataaattagtatctacactaaacaacataattagaattgattatacatagtgcgaaagagctctatgatttaaataaggatttctgacagatctgtttctaactagcagcctccttataaacacaaacagttatttatagttatactgctaactactttacaggaggtggggagggtagagcaagaggaagaaaggacccgtttgagaaacttaagaagaagagcttctgatcgctttaaagatttaacgtttggatttataagcatttcacatcagggaaccaaagagagcagataatttcatttactgtcattgggttaatttgatctagtaagcagctttgagtatagattataaatgacaccaatttatatgtacatagattgtataaataagatatgagtgaggaacatgatgtacactggcattttctttgttagtgtcaatgtaatttaaaatgacacttaccggatggtggataggatattaagtgatggtctcacatatagtgccacttaaatgttgcaggtaagttagtaaacccttttaaatgaagtaagtatggcaatacttaaaaatacatattttggagaaagccaagttccattagtggaaaaacagtgctccattaccaaggtaagttacttagccttgttcttcaagatactagtgttgtctatgtagccagttgtcagcaagtaaattgctttccttgaaatagtttctgtggtgatttttactgacttatcaaaaagccagaatttacttctgtgtttctgcgttcacatccttttttcctcccatcagtgaaactgttacgagattcatctttctaaaataagattttaaaattatcttgcttccagccatggccctttttctcagaaatctttaaaggttcctcttttacctaaagctcttcattggttattttgagcttggtattcagtactcttcatcttctggtgacagcttactttctcttttcactgctttgccacatatatcctctctctgattgcccaagctgcttccctaaaaatgtgtcattcatttccctctacctttgcctgcacattcttcctgcctaaccaccgtacttaagggatagtcaaaattcaacttacttttacaaagcctaccttgaccctctagcaggagtttctggattcttttattatatttattatcttattttccttttttaattagttattttattgcaaatataatatctccccagtgagataaattcctaaagggatagcttaaagtatcagttttctgggtcactcattagtgcctatcatgatgtttgaaacatgtaatattgttgattgtgttgagtactatttatttttacctttaggtttaccattgcttgttcagagaacaattgcgagaactattgtgttacaagaaagcattggcaaaggtcgatttggagaagtttggagaggaaagtggcggggagaagaagttgctgttaagatattctcctctagagaagaacgttcgtggttccgtgaggcagagatttatcaaactgtaatgttacgtcatgaaaacatcctgggatttatagcagcagacaataaaggtctgtaacatttgcttttccttatgttatatataacaagatctctttaagtctttacagatatggtgactaaccatcatcaaagtagatgagacatagatgtctctcatgtagattagacccattaagtcgaatacaatatattagtaacttttagaactaggaacttcttcaagattttcttgactcttgatagcattcctaaaatctcttaatgttttataaaatataaaagagctattttaaaaagccatgtactttgttggtttagtttagggcagttagttattgagagtactcatgatatagaaaagatatataaacttgctcaaaattttgagaatagggctcagatagctgtttccttttaatctcttcctgaccagtaggatgtttcaatatggactattgaccttattaatggggagagtaaaaataacttgtcagtgttctgagttgccaagggctaaatagatgaatcttctggcaaactcaaagagataaattgtttcttcaaccaccctggtaactgtacggacacttttctgcctatcatgctggtgcctgaggcccagtgtcaggtcagatgctgaagaaggaaggaagcctgtcagcagggagtcagaatgagtggggactgcaagcagtgaccttagactgtgctgctgccactttcttagcttccgttaatacctttatgcccatgattcctactttttttttttttgagatggaatctcgctctgtagccaggctggagtacagtggtgcaatctcggctcactgcagcttctgcctcctgggttcaagtggttctcctgcctcagcttctcgagtagctgggactacaggcgtgcaccaccatgcccagctaatgtttgtatttttagtagagatggggtttcaccatgttggccaggttggcctccatctcttgacctcgtgatccacccacctcaccctcccaaagtgctgggattacaggcatgagccactgtgcccagcccccacgattcctatttttactgcctctgtcagagacttgtgtttcagctccactcttgtcatccctacccctgaatcaaatgtatttcccagctttcctatttaaaaaaaaaaaaaaatgctgtcattatctcttagcttggccagacctgtagtcatctttttccttctcccaccttccatttacttcagcaatatttatttattcaaatattaacagtgtttaacctcagttggtaattatgggtgatttttattatttttcttttagcttctctgggttttcaaatttatttacaagcatgtactgcttttttttgttattgacttttatttgtagaaaatttccaatatgtagaaaagcagagtagttacagtgatccctcatcgtccagcttcaacagttgtcaggtcactgccaatcataattgatgtctgatcccacctactctgccctaactgtgttatttgaagctggtcccagacaatatgttttcatctgtaaacacttataaaatgtaatttgtatcttcaaatgatgaggaaatgtttttatgaaacaaccacactaccattgtcagttttttaaatgttatcaaatatccagttaggttcaattctataattgtctcctattaaaaaaattatttattcaaattatgattctaagtccacaagttatatttagttgatatttctcttatgtgtcttaaaatttaggtccccccttcatcttttttctcctctcgcagcttatttgttgaagaaattggattgtttatcctgaagggcctatcacattctggattttgctgattgcatttccatagtgtctcttaacttgttcttctatcttttctgaaaactggtagttagatttagaagctaaacctaattggagttttattggttttctcaaaatacatactaaggatattatatacatcctattgcatcatatgtggaggtgtatagtgtttgattaagacggggcagtgaggtatatgatgaatgtaggtagcgattatcagtggcacctgacaatgtaatacctcttaagttaaaaacaaaacaggccgggcacagtggctcacgcctgtaatcccagcactttgggaagccaaggtgggtggatcacgaggtcaagagttcaagaccagcctggctggccaagatgatgaaaccccatctctactaaaaatacaaaaaaattagccaggcatgatggcaggtgcctataatcccagctacttgggaagctaaggcagagaattgcttgaacctgggaggtggaggttgcagtcagagctgagatcgcaccactgcactccagcctgggcgacacagggagactctgtctcaaaaaaaaaacaacaacaaaacaaaacaaaacaaaaaatagtaatcagtctgaccaaatccttagttctcattttcgtttctgcctttatcaccatttatttcctcccccaactcttaaaacaaccttttctttatttactgtgtttgatgaccctagactttccttgttccttcttacttcttcatagttgtctttgttttctcaactcttactcttctcactggttcatatgaaggtactgattttataagtggtaatttcttccttaagaacatagccacattcatggtttcaaactctaccatgttggcaactctcaaatctccatttgaaagcttaaacctcacccagggtctggattttgtcacattccaagttacaaacacagcagcacaaaatgttggtgagtctgtgccctgaacttctaaccaggctgatgctgtcatctggtggtcaccatgggaactagctgaccctactggctcttccctactccccttctttcttctttgtcaggggttaatgtactttctctgagcctagcccctccacctcagttcctttatcttctcctgatttagttaattccacccccggcagccctttatatttatggccccttacatataaccttccttctatcttgtccataacctgtggtttccctttcttccatctgcctgtcttccactttgtttcttgtatttgtgagcttttcaaaattcagtaatggttaagaggcatgcaaataagctagtgatgtgcctatatcaaggaaaagcaagggtgcgagtttggtcagaatcagtttataaagttcatgaagaacaaattaatactaagtccttttaaatgtacccagaaatctcctccagaatcttctgaaaagtttctattcctttcttaatctcttctaatcagagttggttttcttcttcaaccaaataccttcaaaatagaagctgtttcatgtcaatatggattttttcttttggtttacaaccagcagggaaagaaagagcacagtttatgtacttcttacctaaagaatctagcattccgttttttaaatcttaacagtcttacaaagtaagactttattcttgtataaaaggagaaacaggctccttgtcagtaacaggcaggccgtggattccaaccaggttagaatgactctaagcgtccatcttttactggattgtgctgtctcctaatgttgtaatgctttttttcttcatggcttaattaagcatgtggttttccagctacttctaggttaaattagattgtcgtggaccagtctagcttaggagcctagctagtgtctttaccattattcctatgagaaaacatgttttaaactcgtgttttggcttacagaggaaattttggaacccacgttcctcgttgtttgagtttagtcccagcttttccagttttgctcctgacatttcagttcctatttcagcttccccatgtgttagaggtatcactatttctgtttttctaagctagcaaccttggaatcataatcatcttgtcttgcgtctttgtgaactgtgtacacaatctgtcactaaagcttgtcatttcttgttgaaactcactttcagttttgtcccatactcttccattcccactgtggccacactggtctccggagacttctcacctccttgcttccctctctgttccttccttttttttaaccttctctccttccaggaacagccactgagcacccaacccgacccagagatttttctaggcacttaagagtgccagctctgataccaattatctgtgaagactcaaaaaagtcaccatctttgtctcttaaatgggattaattatacttgccttatctcaagaagaggggcttactctgaggaactaaaggatgtgtacataaaagtataaaacaaacaatgtagaagaaaatgtgaaggaaatacagacttaaggtggcattatattgcagtgtgtgactcaggattgagagtaaaaagtaataaccattgaacaaataaatcataaatggtctgcagcccaaccgaaatgttaattctgttttacagacaatggtacttggactcagctctggttggtgtcagattatcatgagcatggatccctttttgattacttaaacagatacacagttactgtggaaggaatgataaaacttgctctgtccacggcgagcggtcttgcccatcttcacatggagattgttggtacccaaggtaattctataagcagttctattatttaagctttaaattttcatgaataatgtctatgaaaatagaaggtggaggctgggcctggtggctcatgcctataatcccagcactttgggaggctgaggtgggcagatcgcccgatctcaggagttcatggccagcctgggcaacatgacaaaaccgcatctctaccaacatacaaaaaattagtcgggcatggtggcatgcacctgtagtcccagctactcagggggctgaggtaggaggattacctgagcctgggaggtcgaagctgcagtgagcagacatcatgccactgcactcccagctgagtaatagagagagaccctgtctcagaaaaaaaaacaaaaacaaaaacagtaggtggcctaactggagatatttaaaacaaattttttagatgagaacattttatctttcagttcaaaatttcaggtagagctaggaatctggaaatttgtttagagattctctagtcgttgtaacaaaactgtgattttttttgagttcttaaaagtagcattcaatcttatgatttttgaggatctcagtttcagaattcaggtccaactgaatatatttttatgtgtagtatcaaatgaaatgtgaaagtgctttgtaaacatcaacatgctaggtaactgttatctggccatctaataattatatttgaccttgagataaggagactgcatgagatagttttacagttgaaaaattaaatactaagttttagttatgacatttgtatgctgtagtttttgtgcatgtgggatttcagatgccagtatatctctctgctctagcagttgtccacttgcaacccaatggctcccccactccccactttacatacagcataagtgctagttcacatcttagctccatctttgtagttattattattattgattgtaacagttttattgagttataattcacatcataaagttcacccacttaaagtgtaaaattcagtggtttttagaatactcagagttgtacagccagcaaacactacagtcaattttagaatatcttcactccaaagagaaaccctgtagccactagcagtcactcccctttcctcccaaactccttagccctaggcaacaactgctcctttttgtctgtagatttgcttattctgcacattttatataaatgaatcatacaatatgtggtcttttgtgactggcttctttcacttagcatgttttcaaggttcatttatgttgtagcacgtatgagtacttcagtcattttgatggctaagtaatacttcagtgtatggatatggcatatgtcatatatccgttcgttgatggacatttggtttgtttcttttggccattgtagctaatgctgcagtgaacatttgtgtacaagttgtatgtagtttcatgttttcagttatcttgggtatatacctaggagttgaattactgtatcatatgataactctatttaatggtttgaagaactgccatactattttcttaaagtgcctgaaccattttacattcctgccagcagtgtatgaaggttccaggttttccacattataattattattttttaataacattttctagtggttagcatcaaagataatatacttaatactgagtacattgcagttgatagggaagtgatgttctacatgcttggttcctgggctgctggaatatcagtctatggctaagtttcttaaaaagaattcataaggcaccaacagataaactgataactttttttttgccccagtctttgagttgttcatcttttaaagcatgttattgtccacattttctttaaagaaatataaattcagtgacttttggtgtagtgattcacttgagtttaataatgccgtaagtattgtaggtcatgtgggctgaaatgctttgataatttgggttgggagaagagacttttgaacctaaagatgtgagttgtgattggtattaccttttaagcagtcatgtttaatttttgattctttaggaaagccagccattgctcatagagatttgaaatcaaagaatatcttggtaaagaagaatggaacttgctgtattgcagacttaggactggcagtaagacatgattcagccacagataccattgatattgctccaaaccacagagtgggaacaaaaaggtatacttttgaacaactatatttaatatcttctgaaatcaccttttttcccttctctttcatatatacatatcattgctgaaactcagcttaaacttgcactttattagattgccaacaggtaagaagatctcatggtcttgcctgctctgaagccagagttacctgacttaaaaagatgcctgctgatgaaaggttgcccttccagaaaatatcattaggcatgttaattataataacagtagtaactaacgtttatagggcacctactatgtgccaatcgtctaataggtcttttacgtatattacctcatttaatcccttctcaaatactgtgcagtagctagccctgctattttcatatttcagttcctaaaaatatgcctttcttgctttcttagaacttttgcacatgctgtctcctggagcatactttaccctactgtttctcagcctcatacccacctttcccgtaggaagttttttctagtcctcaaaaatcttaggagtccctgccagggactgtcatagcacactgaactgggaccgttgaggcacttatgcgttatgttgtaactgtttatttatttgcctatatattctattaggtgcaagctgcttgagagcagccttgtattcccagcatccatcacagtgcctaatacatggtagatcctcagtagatatttgttgagtccatgagtcttcaaaagaacttaattaggtaggtgttattaccctttaattcacagatgaggaaaccaccttgaggaggttaaataatatggccagcttcatgtggatgataagccgaagagctgagatttgaacctgggcatttctgacccaaaccccttatcacaagctgtcacagcattttttcaaactactgtcttggccttggagacagctggagagccagcagcattagtctattcaaattgcatgtataattttgagatttctggattccctggggactctcaattttcccatccaagtactaagcaggcccgaccctgcttagcttccaagatcagacgagatcgggcgtgtttagggtggtatggccgtagatgactctcaattctcaaccagctaaggggtccttgtcagtggttgctgtaggtctctgtgggtcctgacccataattttggtaggtttttgaagcttcagtatgaggactggcattcttttgtatctattatttttttccctggagtatattcgtgcccttcctttcatcctcagtgagaagacttctaaattaaaatgcatggtttctacctagtacgtgtataggtggtgtacattaggacacctttaacagtcacaattgttatgtatgtctttcattggaaaccaagatcatgaggcagatagtgtgaaactgctattttagcattttgtgggatttagttgacatcattaatgtgcaaaccagtgtggatatttaatatttttcttgagtctaatatttgttatgtaatattgtgtacatatgtctatgtataaagaaatgtctgaaaggaggttcatccaaatatggcagtaaggggatgattttcaaagttctttttgcaaattttttttaggtacatggcccctgaagttctcgatgattccataaatatgaaacattttgaatccttcaaacgtgctgacatctatgcaatgggcttagtattctgggaaattgctcgacgatgttccattggtggtaaattgctctcctctcccccagtagtttgtcatgagcagaagttgttcaagaattgtcttctttttttaattgaatgaaattatgtacagtccattatctgaaacaggatgtcaccgagtgccagagaaaacaaaggcgatgaaacctttgggaggggacagtgccatggtgtgcacatgcacagctctagcctagtgtattctcttcctgtttccatttgaatctggagactcatcagaacccaaccccttgttatattggaatatagttctttagaatggacagctgcttgagaggctcacctaggaagctgtttctagcatgtacctgggtgtcaaacttattttttttctttgagattgtggttattttctccaacttgatagttacagttacatacacagaatacaattatgttaccattgtgttgtattctagagttagtttgttttaacttctagctttttagatggagtacttttaatgtttactcaggaaacagtctcttaggcttggggacctagacttggctgagacctagtgccttaggtttttgaagcagtgagggacagagtatttctctgtattgtagtaaataggatatattattgacagatgcaagtagagaaagggacttggcaccttaaacttgcctcataagattcaagtctcactgatagggtatatatatccctgtgcaagtgagagcctgtgcacttacagaatagaatctcatttgctgcacaatagggttctaggggaaaatgtcaatctggtcatcacagctcatagtttactgtcatttcaaataggctttattgatctcatggcaatacttagtttcaaggtgtgggtggaatatcaactcagggaagtggcttgtggatacagatgtggatgagatagagaaagctgtaatctctgttccacatacctactttagtaatgaaacactgtaataggtctctcaggtgatcttttaatgccttggcattagctgaataaattcatcaaaatttaattttttttaaactgatacaggaattcatgaagattaccaactgccttattatgatcttgtaccttctgacccatcagttgaagaaatgagaaaagttgtttgtgaacagaagttaaggccaaatatcccaaacagatggcagagctgtgaagtgagtatttctttttgatattaggcaattttctaaactgcttctgcttagtaagcaaaagtttgctacttttctttaaggaaaacttttctttaagaattttctttttcatagcagtcaaaccaatgtttaaaaacagaataatttggttttcatattcaattgtaagcacattgaaagggccatggaacatttgcagtggcctttagtgtatcagaacatagtttagatctgccgggcgaactaaggcacatatttttaaatgaatgcctcccttcagccggggcaacccagaacactagacagttaccggacatgaatgaggagccctgtattctagaccagcctggctaccatttcaagggtctgactctgaacaaatccctttagttctctggactttaatatccctttgcaaggtgaggaactcagataaggtgattacaaaggtgtttcaaatgattttccgttttattcatctgattgcccagataaccgttaaccaggaatttagggaaaatgcttttttccagcagtatctgagctgctcaacttcagctctaacaaaaagttttagaaacgtttttgtaattgtaaatttaaagattcgtaagatgaattttatttaacctctccttaattgctagctgttactattacaatattggtgaagcagagcatattcctccaggtttgaagatttgtagcttaaaaaggctataaaaagctgttcagttcagtagttgattttacgtcttaaactattgtaggactcagcagaacctctgataagcaagagagcttgctacctccaacaaaatcacatctccaggcccaaataaataaaatgtatttcagcatgcttaaggaatttgcatgtgacatagtttaataaatgagagtgctgctagattttgtcttttagaaatttgatctacttgggaggctgaagtgggaggattgctggagcctgggaggtcaaggctgcagtgagctgagggcatgccattgcattccactttgggcggcagagtgagaccctgtctcaaaaaaaaaaaaaagaaagaaaaatttgatgtgaatacttcaaagtacaaacttaaaatttcagtgtgaggtcagatttcttctttgctttgcccagctctggtttaggattcggccttttcaggtttgctaaatgagtcactctttgtccacctgctttccagcactggcaccagtaccctattgatggaaatttatgtaatttctactcatttgctattacaaataatgcttaaacaataacaagtgtatatgtcatttaaaaagaaaatttacacgtaaaaattcttatccagaccaatggaaaatggtgcatgcattaatttttttttttatattttcttgtaggccttgagagtaatggctaaaattatgagagaatgttggtatgccaatggagcagctaggcttacagcattgcggattaagaaaacattatcgcaactcagtcaacaggaaggcatcaaaatgtaattctacagctttgcctgaactctccttttttcttcagatctgctcctgggttttaatttgggaggtcaattgttctacctcactgagagggaacagaaggatattgcttccttttgcagcagtgtaataaagtcaattaaaaacttcccaggatttctttggacccaggaaacagccatgtgggtcctttctgtgcactatgaacgcttctttcccaggacagaaaatgtgtagtctacctttattttttattaacaaaacttgttttttaaaaagatgattgctggtcttaactttaggtaactctgctgtgctggagatcatctttaagggcaaaggagttggattgctgaattacaatgaaacatgtcttattactaaagaaagtgatttactcctggttagtacattctcagaggattctgaaccactagagtttccttgattcagactttgaatgtactgttctatagtttttcaggatcttaaaactaacacttataaaactcttatcttgagtctaaaaatgacctcatatagtagtgaggaacataattcatgcaattgtattttgtatactattattgttctttcacttattcagaacattacatgccttcaaaatgggattgtactataccagtaagtgccacttctgtgtctttctaatggaaatgagtagaattgctgaaagtctctatgttaaaacctatagtgtttgaattcaaaaagcttatttatctgggtaacccaaactttttctgttttgtttttggaagggtttttgtggtatgtcatttggtattctattctgaaaatgcctttctcctaccaaaatgtgcttaagccactaaagaaatgaagtggcattaattagtaaattattagcatggtcatgtttgaatattctcacatcaagcttttgcattttaattgtgttgtctaagtatacttttaaaaaatcaagtggcactctagatgcttatagtactttaatatttgtagcatacagactaatttttctaaaagggaaagtctgtctagctgcttgtgaaaagttatgtggtattctgtaagccatttttttctttatctgttcaaagacttattttttaagacatgaattacatttaaaattagaatatggttaatattaaataataggcctttttctaggaaggcgaaggtagttaataatttgaatagataacagatgtgcaagaaagtcacatttgttatgtatgtaggagtaaacgttcggtggatcctctgtctttgtaactgaggttagagctagtgtggttttgaggtctcactacactttgaggaaggcagcttttaattcagtgtttccttatgtgtgcgtacattgcaactgcttacatgtaatttatgtaatgcattcagtgcacccttgttacttgggagaggtggtagctaaagaacattctgagtataggtttttctccatttacagatgtctttggtcaaatattgaaagcaaacttgtcatggtcttcttacattaagttgaaactagcttataataactggtttttacttccaatgctatgaagtctctgcagggcttttacagttttcgaagtccttttatcactgtgatcttattctgaggggagaaaaaactatcatagctctgaggcaagacttcgactttatagtgctatcagttccccgatacagggtcagagtaacccatacagtattttggtcaggaagagaaagtggccatttacactgaatgagttgcattctgataatgtcttatctcttatacgtagaataaatttgaaagactatttgatcttaaaaccaaagtaattttagaatgagtgacatattacataggaatttagtgtcaatttcatgtgtttaaaaacatcatgggaaaaatgcttagaggttactattttgactacaaagttgagtttttttctgtagttaccataatttcattgaagcaaatgaatgagtttgagaggtttgtttttatagttgtgttgtattacttgtttaataataatctctaattctgtgatcaggtactttttttgtgggggttttttttttgtttttttttttttgttgttgtttttgggccatttctaagcctaccagatctgctttatgaaatccaggggaccaatgcattttatcactaaaactatttttatataattttaagaatataccaaaagttgtctgatttaaagttgtaatacatgatttctcactttcatgtaaggttatccacttttgctgaagatattttttattgaatcaaagattgagttacaattatacttttcttacctaagtggataaaatgtacttttgatgaatcagggaatttttttaaagttggagtttagttctaaattgactttacgtattactgcagttaattccttttttggctagggatggtttgataaaccacaattggctgatattgaaaatgaaagaaacttaaaaggtgggatggatcatgattactgtcgataactgcagataaatttgattagagtaataattttgtcatttaaaaacacagttgtttatactgcccatcctaggatgctcaccttccaagattcaacgtggctaaaacatcttctggtaaattgtgcgtccatattcattttgtcagtagccaggagaaatggggatgggggaaatacgacttagtgaggcatagacatccctggtccatcctttctgtctccagctgtttcttggaacctgctctcctgcttgctggtccctgacgcagagaccgttgcctcccccacagccgtttgactgaaggctgctctggagacctagagtaaaacggctgatggaagttgtgggacccacttccatttccttcagtcattagaggtggaagggaggggtctccaagtttggagattgagcagatgaggcttgggatgcccctgctttgacttcagccatggatgaggagtgggatggcagcaaggtggctcctgtggcagtggagttgtgccagaaacagtggccagttgtatcgcctataagacagggtaaggtctgaagagctgagcctgtaattctgctgtaataatgatagtgctcaagaagtgccttgagttggtgtacagtgccatggccatcaagaatcccagatttcaggttttattacaaaatgtaagtggtcacttggcgattttgtagtacatgcatgagttaccttttttctctatgtctgagaactgtcagattaaaacaagatggcaaagagatcgttagagtgcacaacaaaatcactatcccattagacacatcatcaaaagcttatttttattcttgcactggaagaatcgtaagtcaactgtttcttgaccatggcagtgttctggctccaaatggtagtgattccaaataatggttctgttaacactttggcagaaaatgccagctcagatattttgagatactaaggattatctttggacatgtactgcagcttcttgtctctgttttggattactggaatacccatgggccctctcaagagtgctggacttctaggacattaagatgattgtcagtacattaaacttttcaatcccattatgcaatcttgtttgtaaatgtaaacttctaaaaatatggttaataacattcaacctgtttattacaacttaaaaggaacttcagtgaatttgtttttattttttaacaagatttgtgaactgaatatcatgaaccatgttttgatacccctttttcacgttgtgccaacggaatagggtgtttgatatttcttcatatgttaaggagatgcttcaaaatgtcaattgctttaaacttaaattacctctcaagagaccaaggtacatttacctcattgtgtatataatgtttaatatttgtcagagcattctccaggtttgcagttttatttctataaagtatgggtattatgttgctcagttactcaaatggtactgtattgtttatatttgtaccccaaataacatcgtctgtactttctgttttctgtattgtatttgtgcaggattctttaggctttatcagtgtaatctctgccttttaagatatgtacagaaaatgtccatataaatttccattgaagtcgaatgatactgagaagcctgtaaagaggagaaaaaaacataagctgtgtttccccataagtttttttaaattgtatattgtatttgtagtaatattccaaaagaatgtaaataggaaatagaagagtgatgcttatgttaagtcctaacactacagtagaagaatggaagcagtgcaaataaattacatttttcccaagtgccagtggcatattttaaaataaagtgtatacgttggaatgagtcatgccatatgtagttgctgtagatggcaactagaacctttgagttacaagagtctttagaagttttctaaccctgcctagtgcaagttacaatattatagcgtgttcggggagtgccctcctgtctgcaggtgtgtctctgtgcctgggggcttttctccacatgcttaggggtgtgggtcttccattggggcatgatggacctgtctacaggtgatctctgttgcctttgggtcagcacatttgttagtctcctgggggtgaaaacttggcttacaagagaactggaaaaatgatgagatgtggtccccaaacccttgattgactctggggaggggctttgtgaataggattgctctcacattaaagatagttacttcaatttgaaggctggatttagggatttttttttttccttataacaaagacatcaccaggatatgaagcttttgttgaaagttggaaaaaaagtgaaattaaagacattcccagacaaatactaagacaatttgttgcctatggacgtctgccttacaagaaatactaaatccttcacacagaaaataaatgacaccagatggtaacctgaatccacaggatgaaatgaagagcaccagaaatggtggatatatgtacaactagcaaagactgtatgattgtatagctgccataaattactacaaatgccctggcttaaagcaacacctatttatgatctcagaattccataattcagaagtctaggcatagctcagatggttctctgctccatattttaaaaggtcaaaatgaaggcattggctgggcaacattcttttctggaggctcggatgaataggcttccaagctcattgaggttgttggcagaattcagctccatatggttgtaagacaggttggccaggggtggttgtcagtttctagaagccactcaaattctttggctcgtggttccctcctccatcatcaaaaccagcagcaatgggttgaatcatccttgcacttttctcggatctccccttctgcctcatctctccactgtctcttccactgcatctctctaatgcttctgcttccctcttctgcttttaaggggccatgtgattactcagggggccatctggataatccaggataattaccctatttagtaacctcagttttacctgcaaagtgcattcactgcagtaccaagattagtatttgattaaataactagagaatgggaatcttggggaaataatttgcctaccaaaataaatgtaagttatctttcagtagcataagactatatagtaattacatcaccatactgttgggtttacaatataggtgcagtgtatattaataacaaaggagtgggtaggaaatggaactctattgggacaaagatgtatcttattagaattaattagtcctaatttgaagatgattgtaataaattgaaatgcatgctgtagagcctggagtaaccactgaagcatcaatttaaaaataaattaaaaaaaacaaaatggtacaccaagaaatatttaacacaaaaggcagaaagaaagaagcaaaatgatagacatttggaaaacaaatagcaaaatggcagccataagtaatcatgccaataatttcattaaatgtgaatggactaaatagttaaaaggtagagatggtcaggatggatttaaaaagaaaaaactatatggtgttcacagaggcacactgtagattcaaagaccaatagctgtaaagtgaaagtatggaaaaatataacatgcaaacagtaatcgtaagagagctggaatgtctatatcagtacagtgg

SEQ ID NO: 102 - RNA, 6475 nt, Homo sapiens
  source 1..6475: mol_type = mRNA
ggcgaggcgaggtttgctggggtgaggcagcggcgcggccgggccgggccgggccacaggcggtggcggcgggaccatggaggcggcggtcgctgctccgcgtccccggctgctcctcctcgtgctggcggcggcggcggcggcggcggcggcgctgctcccgggggcgacggcgttacagtgtttctgccacctctgtacaaaagacaattttacttgtgtgacagatgggctctgctttgtctctgtcacagagaccacagacaaagttatacacaacagcatgtgtatagctgaaattgacttaattcctcgagataggccgtttgtatgtgcaccctcttcaaaaactgggtctgtgactacaacatattgctgcaatcaggaccattgcaataaaatagaacttccaactactgtaaagtcatcacctggccttggtcctgtggaactggcagctgtcattgctggaccagtgtgcttcgtctgcatctcactcatgttgatggtctatatctgccacaaccgcactgtcattcaccatcgagtgccaaatgaagaggacccttcattagatcgcccttttatttcagagggtactacgttgaaagacttaatttatgatatgacaacgtcaggttctggctcaggtttaccattgcttgttcagagaacaattgcgagaactattgtgttacaagaaagcattggcaaaggtcgatttggagaagtttggagaggaaagtggcggggagaagaagttgctgttaagatattctcctctagagaagaacgttcgtggttccgtgaggcagagatttatcaaactgtaatgttacgtcatgaaaacatcctgggatttatagcagcagacaataaagacaatggtacttggactcagctctggttggtgtcagattatcatgagcatggatccctttttgattacttaaacagatacacagttactgtggaaggaatgataaaacttgctctgtccacggcgagcggtcttgcccatcttcacatggagattgttggtacccaaggaaagccagccattgctcatagagatttgaaatcaaagaatatcttggtaaagaagaatggaacttgctgtattgcagacttaggactggcagtaagacatgattcagccacagataccattgatattgctccaaaccacagagtgggaacaaaaaggtacatggcccctgaagttctcgatgattccataaatatgaaacattttgaatccttcaaacgtgctgacatctatgcaatgggcttagtattctgggaaattgctcgacgatgttccattggtggaattcatgaagattaccaactgccttattatgatcttgtaccttctgacccatcagttgaagaaatgagaaaagttgtttgtgaacagaagttaaggccaaatatcccaaacagatggcagagctgtgaagccttgagagtaatggctaaaattatgagagaatgttggtatgccaatggagcagctaggcttacagcattgcggattaagaaaacattatcgcaactcagtcaacaggaaggcatcaaaatgtaattctacagctttgcctgaactctccttttttcttcagatctgctcctgggttttaatttgggaggtcaattgttctacctcactgagagggaacagaaggatattgcttccttttgcagcagtgtaataaagtcaattaaaaacttcccaggatttctttggacccaggaaacagccatgtgggtcctttctgtgcactatgaacgcttctttcccaggacagaaaatgtgtagtctacctttattttttattaacaaaacttgttttttaaaaagatgattgctggtcttaactttaggtaactctgctgtgctggagatcatctttaagggcaaaggagttggattgctgaattacaatgaaacatgtcttattactaaagaaagtgatttactcctggttagtacattctcagaggattctgaaccactagagtttccttgattcagactttgaatgtactgttctatagtttttcaggatcttaaaactaacacttataaaactcttatcttgagtctaaaaatgacctcatatagtagtgaggaacataattcatgcaattgtattttgtatactattattgttctttcacttattcagaacattacatgccttcaaaatgggattgtactataccagtaagtgccacttctgtgtctttctaatggaaatgagtagaattgctgaaagtctctatgttaaaacctatagtgtttgaattcaaaaagcttatttatctgggtaacccaaactttttctgttttgtttttggaagggtttttgtggtatgtcatttggtattctattctgaaaatgcctttctcctaccaaaatgtgcttaagccactaaagaaatgaagtggcattaattagtaaattattagcatggtcatgtttgaatattctcacatcaagcttttgcattttaattgtgttgtctaagtatacttttaaaaaatcaagtggcactctagatgcttatagtactttaatatttgtagcatacagactaatttttctaaaagggaaagtctgtctagctgcttgtgaaaagttatgtggtattctgtaagccatttttttctttatctgttcaaagacttattttttaagacatgaattacatttaaaattagaatatggttaatattaaataataggcctttttctaggaaggcgaaggtagttaataatttgaatagataacagatgtgcaagaaagtcacatttgttatgtatgtaggagtaaacgttcggtggatcctctgtctttgtaactgaggttagagctagtgtggttttgaggtctcactacactttgaggaaggcagcttttaattcagtgtttccttatgtgtgcgtacattgcaactgcttacatgtaatttatgtaatgcattcagtgcacccttgttacttgggagaggtggtagctaaagaacattctgagtataggtttttctccatttacagatgtctttggtcaaatattgaaagcaaacttgtcatggtcttcttacattaagttgaaactagcttataataactggtttttacttccaatgctatgaagtctctgcagggcttttacagttttcgaagtccttttatcactgtgatcttattctgaggggagaaaaaactatcatagctctgaggcaagacttcgactttatagtgctatcagttccccgatacagggtcagagtaacccatacagtattttggtcaggaagagaaagtggccatttacactgaatgagttgcattctgataatgtcttatctcttatacgtagaataaatttgaaagactatttgatcttaaaaccaaagtaattttagaatgagtgacatattacataggaatttagtgtcaatttcatgtgtttaaaaacatcatgggaaaaatgcttagaggttactattttgactacaaagttgagtttttttctgtagttaccataatttcattgaagcaaatgaatgagtttgagaggtttgtttttatagttgtgttgtattacttgtttaataataatctctaattctgtgatcaggtactttttttgtgggggttttttttttgtttttttttttttgttgttgtttttgggccatttctaagcctaccagatctgctttatgaaatccaggggaccaatgcattttatcactaaaactatttttatataattttaagaatataccaaaagttgtctgatttaaagttgtaatacatgatttctcactttcatgtaaggttatccacttttgctgaagatattttttattgaatcaaagattgagttacaattatacttttcttacctaagtggataaaatgtacttttgatgaatcagggaatttttttaaagttggagtttagttctaaattgactttacgtattactgcagttaattccttttttggctagggatggtttgataaaccacaattggctgatattgaaaatgaaagaaacttaaaaggtgggatggatcatgattactgtcgataactgcagataaatttgattagagtaataattttgtcatttaaaaacacagttgtttatactgcccatcctaggatgctcaccttccaagattcaacgtggctaaaacatcttctggtaaattgtgcgtccatattcattttgtcagtagccaggagaaatggggatgggggaaatacgacttagtgaggcatagacatccctggtccatcctttctgtctccagctgtttcttggaacctgctctcctgcttgctggtccctgacgcagagaccgttgcctcccccacagccgtttgactgaaggctgctctggagacctagagtaaaacggctgatggaagttgtgggacccacttccatttccttcagtcattagaggtggaagggaggggtctccaagtttggagattgagcagatgaggcttgggatgcccctgctttgacttcagccatggatgaggagtgggatggcagcaaggtggctcctgtggcagtggagttgtgccagaaacagtggccagttgtatcgcctataagacagggtaaggtctgaagagctgagcctgtaattctgctgtaataatgatagtgctcaagaagtgccttgagttggtgtacagtgccatggccatcaagaatcccagatttcaggttttattacaaaatgtaagtggtcacttggcgattttgtagtacatgcatgagttaccttttttctctatgtctgagaactgtcagattaaaacaagatggcaaagagatcgttagagtgcacaacaaaatcactatcccattagacacatcatcaaaagcttatttttattcttgcactggaagaatcgtaagtcaactgtttcttgaccatggcagtgttctggctccaaatggtagtgattccaaataatggttctgttaacactttggcagaaaatgccagctcagatattttgagatactaaggattatctttggacatgtactgcagcttcttgtctctgttttggattactggaatacccatgggccctctcaagagtgctggacttctaggacattaagatgattgtcagtacattaaacttttcaatcccattatgcaatcttgtttgtaaatgtaaacttctaaaaatatggttaataacattcaacctgtttattacaacttaaaaggaacttcagtgaatttgtttttattttttaacaagatttgtgaactgaatatcatgaaccatgttttgatacccctttttcacgttgtgccaacggaatagggtgtttgatatttcttcatatgttaaggagatgcttcaaaatgtcaattgctttaaacttaaattacctctcaagagaccaaggtacatttacctcattgtgtatataatgtttaatatttgtcagagcattctccaggtttgcagttttatttctataaagtatgggtattatgttgctcagttactcaaatggtactgtattgtttatatttgtaccccaaataacatcgtctgtactttctgttttctgtattgtatttgtgcaggattctttaggctttatcagtgtaatctctgccttttaagatatgtacagaaaatgtccatataaatttccattgaagtcgaatgatactgagaagcctgtaaagaggagaaaaaaacataagctgtgtttccccataagtttttttaaattgtatattgtatttgtagtaatattccaaaagaatgtaaataggaaatagaagagtgatgcttatgttaagtcctaacactacagtagaagaatggaagcagtgcaaataaattacatttttcccaagtgccagtggcatattttaaaataaagtgtatacgttggaatgagtcatgccatatgtagttgctgtagatggcaactagaacctttgagttacaagagtctttagaagttttctaaccctgcctagtgcaagttacaatattatagcgtgttcggggagtgccctcctgtctgcaggtgtgtctctgtgcctgggggcttttctccacatgcttaggggtgtgggtcttccattggggcatgatggacctgtctacaggtgatctctgttgcctttgggtcagcacatttgttagtctcctgggggtgaaaacttggcttacaagagaactggaaaaatgatgagatgtggtccccaaacccttgattgactctggggaggggctttgtgaataggattgctctcacattaaagatagttacttcaatttgaaggctggatttagggatttttttttttccttataacaaagacatcaccaggatatgaagcttttgttgaaagttggaaaaaaagtgaaattaaagacattcccagacaaa

SEQ ID NO: 103 - DNA, 129000 bp, Homo sapiens
  source 1..129000: mol_type = genomic DNA
aagatgacatttattatagtatgtatagtacgtagttggcgtttttttcccccctgaggcaaggtctttctctgtcacccaggctggagtgtagtggcatgctcatggctcacagcaaccttgccttcctgggctcaagtgatcctcctacctcagcctcctgagtagctgggactacaggcgcatataaccacgcttggctaattttttattttttgtagagatggggggtctcactatagttcccaggttggtcttgaactcctgggctcaagtgatcctcctgcctcagcctcccaaagtgctgggattacaggtgtgagccactgtgcccagcctgtagtttttacatcctaatgatcaagaccctttaggtctcaccagactatcatgaggtcctttattacctctcctgattagtaaaagtcaggcttactcattcatagacttaaacccttggttgccacagcttctgtaaagcttggacactgaaacaagatagacgtaatcagtctcagagaatagctaactcagtgaagtgggcttaggggtttacagtgtttgagaatggctggcattatttcttaggctactgcctggaggtggtaaatgctgaattataattttaatggagagatgaggatgtagtttgatctaggatgttgtttgcaatcacatgaacaaagaccaagcaagcaatggaaaaatgaagacaactgagaggtaggctagggcgagtaaaggagcaggataaagagaaaaaaaaagcaaataaagttcagagctgcagttgtattttaaaggctgtctgcagagcaagagaaagccattggaatgacatgataatcagaatcctacgtccaggcaacaaaacactacccatcctgccacctataaacccagatagttgctctgatctaacaattcagtccatcacagcttagtacagactgcaaactccacctccatccagcctttcctaaccttcctaacttcccatcttctctgatctccaaataacgcagacctccttctgtctctctacagactccctaatatgcaaatacccatccccatttattaacccccatatccctctccttagccctttaattggatttcagtactttccaagtctacttcatcccataccctctgacctactgaaatacttttactccttaatcttctcctcctttcaaatatcctgattccgattcctctgcaaagtctccagccatttttctttccaaagccaattcccccattctgtgctgcccacccacctctgcctcccattcttctttatcccattctgattgccaattttcccacaaattctatcccagttccctaacacagtaatagtctcccccatttctctatggttctttcctgtgcccagactcaacatttctctatccatccagacttcccaagctgctcatctctcttcaccccagaaaataccctgacatcctaatgcgttccaatactctgacctccaattactcccctccctaaacaaaatactcaaacctccatccattcctcttcatcccaacccaactgcctgcctatttgcctttccatcctaatactctagcccccgtatccttctccatcctattaaaagcctgaatcccctctcccatctctcttcttctgctcagataccctaaaactcaagcttcccatctctttccattaattattcaattttattgagcaacttttatgtaggaagaaccatgctagaatctaagctcaagatgcagaagattttatctccctattacccatgatctctgcaccaagcagtctccttcatagcattttataaccattatttgtgaaactacttggttgttgcctgtttctccttctagactataagctacaagagagcagaggttttgtctgttgttctataaacaataaatatttgttgactgaaggactgtactaaacacttagacaataccaaatttaaatcctcaaagatttagctgtataggatcagaattattaacctgatttacaaatggcaatgtacctgaacagttaaaagcttggattctggaacgaaacagcctgagttcaaattctgattttccacttactgtgtgatcttaggcaaattacttaacctctctggtcctcagtgctatcactttttaaatggggatgataacctcatacaagttattttaaattctaaatgaggttaatacgtgcaaagtgcttaaaactggatctgacaaatagtgaacacccaaaaatgattcgcaattatttggacaaatgaggaaacatgatcaggaaggctcagacacatatccagggtcacagacctggttaagttacacaaggtggcagaattgaggcttcaacccaagtttgtctggcttcaaaattctctagtcccttaacgaatataacggaagtgtttgttcttccccttcttttagcatttcgtccccatatcctgtcatctttctccacgcactgtactccgtccgataccgtgacaacccgtcaggacgcccaaactgtcctttctcccgctcactccccacagacagctggcacatcccagctctcccctcagctcaggtggcaggacccacaaccttctgggcgccgcaccctaacttccacacctccccacactctggttcttcatccccaatcgcccccgccgtccccacctcttcccatccaaacctccctccttcatccaccgccccacgcccgttccgggccctcccctctttcccgtccaatcccaattcccagacacgcgcccccgccccgaatccatcccaagccggcccacaccacgcccggtccgggccttcccgcctttgccgccggcccccactgctcgggccggatgccggggaacgggctcggccaggtctgacgctcaccgcctagaagccgagccgagcagtcccgcaggctgaggtagagcgggagaagttcgggctctttcctcaggggcccagcggcgcggcagccattttgttgtgttgtgccggttgccgaggggccgcgcgcgcgtggtcggggctagtctcagccacgcccctctccctctccggtactgttggaagggacgcggaggcgtttcccgcctcttttgcagccagcgcgctaggatgccggggagtcttgggcgcgaggcttccggccgcgcggggccgacgggatgcggtgccttcgccttcggattgcgttgcaggtgaagtgtcgggtgcagagtcagggggagccgaggtttcatgcggcagctgcccgcagtgctgtggccttcgctgagacaaagctgccgccgccaccctctgaaacacggacacgcttctcagggcctgtgtccgaggacggcctgaggcaccggcgcagcgcctccccggcctcccccacttctgatgcttgcgcgctatgagcgagtgttcttatcagcacacttctctctgacagtcgtatctaaagcgaattccctccagggaccgaactgcccaggctcggatgaacctcaaagcggacgcagcctgggctccagctgtcgcgtgaggttcagggagcttgggaatcctaggcagaggatgttcctctgattgctacaagggagttaaagcaagaagcacttgcacaggcttcatctggggcttgcccatgagcacggcgttcacgacatgcattcaacagatattttaaagaatttagcagatactgggctggatgctagggaaacactgaagttttttttaaagtgttatcaccattgacgcctttcactccagtagcctcccgttttgaaggtataccctggaccatgttaccatcagaggctgcacccgctccagaaatccccagtgcaatcgctccccatccttgactataatcctatcatcttagcagcgtgcctgctcaaaagacccctatgccagcgtatttctaaacttccttgcgtcttccagtcccttgttcttaccattttctcgcgatcattctatcctgtcttcatttcctttcttcactacagagtttataggccacctgtataacacttttagaaactccctctctctctgtgtctcagtttccttatctatgaaatgaggtccttttacctattaacacttcctacagttttcctgataattataaaagtgaatcctggccgggcgctgtggctcatgcctgtaatcccagcactttgggagaccaaggtgggaggatcacttgaggtcaggaattcaagatcagcctggccaacaaggtgaaacgccgtctctactaaaaatacaaaaattacccgggcgtggtggcgcacgcttgtcatcccagctgcttgagaggctgcaggaggatcgcttgaacccgggaggcggaggttgcagtgagccgagatcgcgccactgcactccagcctggacgacagagcgagactccatctcaaaaaaaaaaaaaaaaaaaaaaagtccagttttcctgataattataaaagtgaatctctgtgaaagaacttagaacagtgagggacccatagtaagttctcaatatgtcttagatatttcattattagacaaaggttacccagaagcaatacttctttctacgcccaaaagaagagtttaggcaaggagtagggaggtggggaagaatttgcttggcaaagggaacaacttgtgcaaaccccggaagcgggggaaaagagcttggcaatgtgctgaatgttaagtaattcagtgtggctggaacaaaacatgagtatggaaacatgaagtagttcagtatggcttgtgcaaaaatctggggtggagaagctaaatctggaaaagggaccatattataagcagtattaggcacttcatttttccttaaggcagagatggcttcacctctataggaaattcaggggacgtccaacagggaataagctgcaataaacatggggatgcagatgtgtctttgatttactttgatttactgatttccttttccttttacttaaatgtgattcccattgacatttaagtgaatggtgctgtcctctccccaactatttacacgacacagaacgaagcccttggagtttaaacgcagaatttttgaaaagctccacttaagaggagattacattcattttttttcttttcttttttttttttttttttttaattttttgaacagagtctggctctgtcacccaggctggagtgcagtggcaggatctcggctcagtgcaacctccgcctcccgggttcaagcgattctcctgcctcagcctcccgaggagttgggattacaggcacgcaccaccaaggccagctaatttttgtattttagtagaaacagagtttcaccatgttggtcaggctggtctcaatctcctgacctcacgtgatccgcccgcctcggcctcccaaagtgctgggattacaggcgtgagccaccgcgccctgccgagattacattcatttttaatcgaagttcaggtgatatttattagattggaatgtgtacgttgctgagtttcagttctatttgcatatgttttgacacccatcgtttcggtttcttgtacccagaaacttagatttattgcgtaacctcattgctgtgtccctcaaagtctgtaatggtattcacgtgggatccattatcaagccgtggtgtgctgatgtagttcattatcaatcatattagtatcaattaatagccatcaaatatacataaaaagtccagagggtggcgcaaaacacttttctcttgggtgatctctcagtccgtatccagttagccgcggatgggcactcaccggtcccatgttgcccccttttcctcctcatacagacctctgctggtgtctagcatcatctctaacgaagctagagacttcaaaggagagacctttctccagttaatttgaatattaactgtctctcttagcatgctaaaagaacttccttctccaaagcagaagtgagaatacgaaagtaacgcagacaactcgcgttccacactatttttctttatctgatattatgaagaatgtactctgagttgcatttacaatacaaatattagccacgtcagggtgaccaagcttttactcagtcttttttccaaatgatagcaaagctattctgtttaaacttccctcagctttttgcaacccagtttaatcattttgcgaatttgttttagagaagaaacagactagtttgtcagacagggatggcaactttcattattgccatttctttctgtgactggccagtgtgattttgttgttttgttttttaagacaaggtctcactctgtcacccaggtttcagtgcagtgacacaatcataactcactgcagccttgacttctcagactcaagtgatcctcctccctcagcctcccaaatagctcagtctataggtgtgcaccaccacacctagctaatttttaaactttttgtaaagatggggtcttgctgtgttgcccaggctggtcttaaactcctgggctcaagcgatcctcccacctcaacctcccaaagtgctgggattacacgcatgagccagcatgcccagcctgatttttttttaatttttattcatttatttttttttgtttttgttggtgtgttttgttttttgttcttgtttttgtttttttgagacagagtctcactctgttgcccaggctggagtgcagtagcacgatcatggctcactgcaacctccacctccagggttcaaacaatttttgtgccttagcctccccagtagctgtgattacaggtgtgtgactccacgcccagctatttttgtgtatgtgtgtgtatttttagtacagacagtgcttcaccatgttgatcaggctggtcttcaactcctggcctcaagtatccgcttgccttggtcccccaaagtgctaggtttgtaggtgtgagtcaccatacccaaccttaatttttatttttaaatgacatgtagtaactgtacatatttatgggatacatagtgatgttttaatacatataaatgtatagtggttggagtaattagcatatccatcatcccaaacatcatatgtttattttaggaagatttcataccctccttctagctatttgaaactatataatatattattgttaactatcctcatcctatagtaagtatagaacactagaacttattgctcctatctagctataattttgtatcctttaagatatctttctctccttcccttccccctgctacccttcccaacctttagtatcctctgttctactgtttactcctatgagatcaacatttttcagcttcgacatatgactgagaacatgtggcatttaacttactgttcctggcttattcacgtaatatactgtcttccatttccatccgtgttgctgtgaattacagtatttcattcttttttatggctgaatagtattccattgtaagtatgtatgtatatatatatgaatacgcacacacacacatatatatacacatacagaatatacatatatatatacacatacagaatatacatacatatatatatatatatatatatatatatatatatatatatatcacccttccttccttccttctttctttctttcagaattttgttcttgttgcccaggctgcagtgcaatggcatgatctcagctcaccgcaacctctgcctcctaggttcaagcgattctcctgcctcagcctcccgagtagctgggattagaggcgcctgccaacatacccagctaattttgtatttttagtagagatggggtttctccatgttggtcaggctagtctcgaactcctgacctcaggtgatccacctgcctcggcctctcaaagtgctgggattacaggcatgagccactacgtctggcccacattttctttatccattcatctgttggacacctaggttgattccatgtcttggctattatgaatagtgctgcaataaacatggggatgcagacgtgtctttgatatactgatttcttttcctttggataaatgccaagtagtaggattgctggatcatatggtagttctatttgtagtttttttgaggaacttccacactgttctccatagtggatatattagtttacattccaccaacagtgtatgagtccctttttctggctgggcaaggtgactcacacctgtaatcccagcactttgggaggctgaggtgggaggatctcttcagcttaggagttcaataccagcctggagaagatagtgagacctcatctctactaaaaatcaaaaccattagctgggtgtgatggcacttgtctgtagtcctagctacttgggaggctgagtgggaggattgcttgagcctgggagattgaggctgcagtgagctatcatcatgccactgcaatgccgcctgggcaacagaaaccaaaaaaaaaaaaaagagtttctttttctccacatcctccccagcatttgttgtttgctgtcttgataatagccatcctaactggggtgagattatacctcatagtggttttgatttgcagatttgcatttccctgatgattgatgatggtgagcattttttcatatatttgttggtcatttgtatgtcttctttttgagaagtgtctattcagattatttgtccatttttatacaattttgttgttgagatgtttgagttccgtgtgtattccagatattaattccctgttatatgaatagtttgcaaatattttctcccattctctgggttgtttcttcactatgttgattgcttcctttgttgtgcagaagccttttagtttgatataatcccatatgtttatttttgtttttgttgcctgcatttttgaggtcttattcataaaatctttcctagaccagtgtccggaaccatttcccctatgttttcttctagtagttttatagtttctgtcttacatttaggtctttgatccattttgatttatatataaactcacgtacaaggtttttatatagggggagatgtagggatctagtttcattcttctgtatatggatatccagttttcccaggaccatttattaaagagactattctttccccagtgagtgttcttgacatctttgtcaaaaaaccagttggctgtagatccatggattaatttctgagtcctctatgctgtttcatttgtctggctatctgtttttatgacaatatcatgctattttggttactacagctttgtagtatattttgaagactgttagtgtgatgcctctagctttgttctttttgttcgggattgctttggccatttgggttcctttgtggttccataaaaattttgagatttttttcctatttctgtgaagaaaatcattggtattttgatagagattgcattgaatctgtagattgttttgagtagtatggtcattttaataatattgattcttctgatccatgaaaagtgagatgtctttccatttgtttgtaccctcttcaatttcttccatcagtgttttgtagttttccttgtagcagtcttttacatccatgcttaaaattattcctaggtgtttttttaatagctattgtaaatgagattgccttcttgatttcttttttagctcatttgttgtttgtgtatagaaacactactgatttttgtatgttggttttgtactctgcaactttactgaattcatttactagtttctaatatatttttgtggaatctttggggttttctacatatagaattatgtcatctgcaaatagaaataattttacctcttcctttctgatttttgatgtcttttatttctttttcttatctaattgcacttgctagttcttccaatctatgttgattagaagtggtaagtttgggatccttgcattgtaccagatcttagtggaaaagtttttaggttttttccattgatgataatgtgcgctgcaggcttctcataaatagcctttattatgttgtattagtccatttttaccctactataaagaactgagtaatttataaagtaattactgagactgagtaatttataaagaagagaggtttaattgactcacagtttcacatggctggggaggcctcaggaaacttaaaattatggtggaaggcaaaggggaagcaaggcacatcttttgaagcagcaggaggagaggggaagtgccacactattaaaccatcagctctcatgagaacttactccctatggtaagaacagcatggggaaactgcccccatgatccacccacctcccaccaggtaccttccctgacacgtggggattacagtttgacatgagatttgcgtagggacacagtgccaaaccataccatatgtttcaaatgttgaggaattttcctctttttttttttttttttagatggagcctcactctgtcaccaaccaagctgcgaatgcagtggcgcgatctcggctcactgcaatctccaccccccgagttcaagtgattctcctgcctcagcctcccaagtagctgggactatgggcacgcaccaccacgcccagctaattttttttgtatttttagtagagacagggtttcaccatgttcatcaggatggtctcaatctcttgacctcatgatccgcccaccttggcctctcaaagtgtgggaattacaggcgtgagccaccgcgccctgcctatttttttttttgagatggagttttactctatcacccaggctgaagtgcaatggtgcaattatggctcactgcagccctgaccttctgggaccaagcgattctcctgcctcaatctcctgagtaactgggactacaggtatgtgctaccatgcctggctaatttaaaaataattattgtcaagatggggtcttgcagcattgcccaggctggtctccaatttctggcctcaagtgatcctcccacctcagcctcccaaagtattgagattgcaggcatgagccatcatgcccagccaggaattttcattttatacccaaactgttgagactgtttattaataaaggatgttgaactttgtaagatgctttttctgtgtcagctgagatgatcatgtgtttttgttttttttttttttctttttttgagacagagtcttgttctgtcgcccaaggctggagtgagtgcagtagcgtaatctgggctcactgtaacctccacctcccaggtttaagcgattcttctgcttcagcctcctgagtagctgggattacaggcacgcaccacctcgcccggctaattttttttttgtatttttagtagagatggggtttcatcatgttggccagtctgatctcgaactcccgacctcaggtgatctgtccacctcagcctcccaaagtgctgggattacaggcatgacccaccacaactggcccaaagctatgttcgtaagtgcatgaaggctatgactgttgcaactttttagtaaataataattattctccacattaaatatttctctttgctcacttaaagttgtgagttctgtttacctaaagttattagttctctactagcttgaattttgtcagtacttgcctgacatatggttttcttttttttaattttcagtctttctatatcatttagtggtgatgtataccttttttttttttttttttttttaagatggagtctcgctctgtcgcccaggctggagtgcagtggcatgatctcggctcactgcaacctctgcctcccgggttcaagtgattcttctgcctcagcctcctgagtagctgggactacaggtgcacaccaccactcccggctaatttttgtattttagtagagatggggtttcgccatattggccaggctggtcttgaactcctaacctcatgatctgcctgcctcggcctcccaaaatgctgggattacaggcgtgagacaccgcgcccaacctgttgctgcatttttttttgttctttggctgtttcaaaaatgtctaacttttaatagaatattttaagcccattcaagtttgttgcatttgtacttattcctgttcttttacattttctattgaatatgttttcttacagtttctttacatccttttcagctttttgctgattatcttgggtatatccttcttctttacccttttattaaaaattatactagtttttattataaaagtaatgctgggctgggcgcagtggctcacacctgtaatctcagcactttggaagaccgaggtgggtggatcccttgagctcaggaggtccagaccagctaggaaaacatggcaaaatcctgtctttacaaaataaaaataaaaattagccaggtgtggtggcatgtgcctgtggtcccagttactctggaggctgagttgggagaatcgcttgagcgattcgaggctgcagtgagctgtgatcaaggagtttgaggctgcaatgagctgtgattgcactgctgcactccagcctgggtgacagcagaaagctgtctcaaaacaaaacaaaacaaaaaaagtaatgctgtatagaggaatgtgaagtataaggtaaaagcccttggccctgccacctaactgctttccaagatattgtcattgtttactatttttatatccttccagcaattttctccgcaattttctctacctataaaaatatattggctgtagatccatggattaatgtcctcctccctgactatccaaaatttataaactgaaaggaggaccagctttatcaagaatctttttgtcctctttgatggaatgttcctgtggggatttttcagtttatactaatttatactgggatgatttcagctaattctgatttctttagaatgtttttaaatttaaagctaaatttaactttatactttcatatatatatatatatatttttttagatggagtctcactctgtcacccaggctgcagtacagtggcacaatcttggcctactgcaacctctgcctcctggattcaagcgattctcctgcctcagcctcctgagtagctgggatatttattacaggcaccgccaccatgtctggctaatttttgtatttttagtagagacggggtttcaccatgtcagccaggctggtctcgaactcctgacctcagctgatccgccttcctcagcctcccaaatcctcagctgggattacaggcatgagctgctgtgcccagactattttatatttttgattccaaatttgtagtttgaattaagtttaactctatatgtttaaaatttaatttaattgacattcagctttagaagtcaaacttagaagatctgatattttaccaatgcttttgaatttaaattttaaaaatttaattgatagaaatacaaaattaaagttgataaattatttgaggaatttatgagagaatataaaaattgctaacatttgaaaaagtataaaatgacattcaaaatatcagattctatcacatatgaaaatctgcagcaataattctatcacagatgaaatactgaaatcttggggtctaataagaactatcaggaaatgtatttttgttaacagtttcaatatgaaagttaacaaaacactcaaagaaataaactaggaagcaacagaagctagtttatagttttctggagctataacaagtattgtttaaaacttacaacgaccctgttaggtggacagagtagacaatatctcctattctacaaatgaaaaaagtgaagttaacttaagattgaaaaacataaaatctcaaatacataaaatcatactcaattatatattacagagaaaagaaatggaaatgagaaatagagtaggaaaaggaaaaaagaataatttaaaaaaacaaaaaataaaaagaacaacaagaacaaagtgaataagtaaaatttaaaagaactgaaatggaagagatgggggtcataggtcaatgctggtgagattcatgagaagcagtgatataattcttcttacaaagaaatatctcaagattcattaatgggataatattccccattttccccagaataaccaccagttttaaaagttaactagattttggaaggcatttttgcatccttatctttttataattttcactggaataaatcactaactttttatcctgttaaatggggaccatcatatcttatttcatagggttaaagggttaccttcatggaaaagcattgcagtcctatgacctttctggatattgctgcaaacaatttttcaaaaacattttgcacattgccactacagcataaaaatagaagcatttctaaattaaggttcaaatctaacctacaggtcaaattttccaggttgctctattctattatttaattttaaattttttaaattccagttttaacaaaaaattacaagacaagcaaagatgcaggaaagtgtagcccatacaaggaaaagatataataaaaaccacctgaggaaatcttgatctcctagatatggactttacgtgagatattttcagtatgatcaaataactaaaagaaaccacatctaaagaactaaagagaagtgtaagagctacgtcttaccatacaaagaataagacgaaaattataaataagaaccaaatagaaattctgtatttgaaaactacaataactgaaataaaaaattcaatagggacactcaacagcagatttgagcagggagaaaaaaagaatcaatgaacttgaagatagatcaattgagattatccagtctgaggagcagaaagaaaaaaggattaagaaaaatgaacagacctgtagaccatctggtatgccatagaaaacacaaacatatacataaagacagacctttggtataccatcgagcataccaacatatgcatgaagagagttccagaaggagacgagagagagaggaaaggacagaaaaaaatatttgaagaactaatggtcaaaattttcaaatgtgatgagacacattaatccacacattcaagaaaactcaatgaactccaagtatgataaactcaaagagaaccacacctgactacatcataataaaactgtcaagtgtcaaagatgaagagataatcttgaaaataacaagagaaaagcaacacatgatagtacaaaggatcctcagtaaaattaacagctgatttctcatcagaaagcacagaggctactaagtagaaagatgatatattcaaagtgctgaaagaaaaagactgtcaaccaaaaattctgtaaataccatcactttggtgattaagattcaacataagaatttcaagaggacacaaacattcagaccgtagcactaatgatcacagaacccaagggaagcagcttgatgttatctagttgtcttaaaattttctcatgttcttgacattctttgtttactctgccaataccttgccttgtgttattagaggagattccttgtgaagtgttaagagatttgtctttgaagtcagatatgagtttactcctgacttagctactccaaagctggcttcatgagcatgcaacctatgcagtcaccccaaaccccacacgcagaagggccccacacttggtttaatgctctgttgttgtcctgcatttattaataattttatctttgagcttgttttttataaatgaagtctgacagcacgatatttatgtccacaattccttgcctcctcattcacacagagcattcacaataccctgtgaacacagaattccagtgggctcacaaggtgcagaagtttagtgggaatcaaagtgagtacaaagtattaagaaaagtatgtctgtggctgagcaagccggggcactgacagcctgaagagaccacattctccattggaacaggaacttgttttgagtgcagaaagatggtgaaggcatgctaaaaaagaaaaaaagaaaaacaacaacaacaaaaaaacaaggagccttatcatatcctttcttactcatggtatttccttgtattagggaactattatgtgtaccttgaatatgataacatagaaagaaagggaaagataggataattcacagtttctttttctttcaggctttccttgtcctcagaaagcaaaggtggagagtgtgggtagaacatacacatatcaaaaagtaaaataaaaacagctgagctagttttgtgcataatttccactgttctgggaagaatggaatatatatacatgtatgaactatgacatacaaatggtgtaattttggcaattgcacatgcaagtgaaatgctgttatatttgcagcttaaactggtacacaatatgaagatgaatgataaaagtcatgccaataattaaagttattaatttccctttatttacaatgatgttaaatagcaaatcttaaaaagcaccatgacaaattgagggaaagactacagatgaaaggaaaaggcttttttttgagacagtcttgctctgtagcccaggctggagtgcagtggtatgatcttggctcactgcagcctcgacctcctggcttcaagcaattctcgtgcctcagcgccccaagtagcggggtttcaggcacatgccaccacgcccggctaatttttgtattttttgtagggatgggtttttgccatgttggccaaggtagaggaaaaggctttatgtttatattttaataccttaacagcatttttcctgcttttttgaataagagatgccacatttttatcttgcacaagatcactcaaattatgtaagtggccagagctacttttttgtgtgtgtgattctgggcttttattattatttttgagacagagtctcgctgtgtcacccaggctggagtgcagtggcacgatctccgctcactacaacctccatgtcctgggctcaagtgattctcctgcctcagcctcctgagtagctaggattacaggcgcccaccaccacacccagctaatttttgtatttttagtagagacaaggttttaccgtgttggccaggctggtgtcgaactcctgacctcaggtgatctgcctgcctcgacatcccaaagtgctgggattacaggtgtgagccacttcgcccgacctgattctgggatttttaaatgaagcaatacagaccttctgattatcagattctttgtctgtaaaatgagtataatgctgaatcattccaaccaacatcaagtgacttctgctgctgggcaattattttattaatttaatattttctatataacttttatgaagagatccagaaagcattctaggggtctcaggataaatagggggaaataaaattacttagagtcagctgggtggggtggggagggatagactaagtgttttgagagatttggcagttattttggaaggaaaaaaaaattcaaagattttgtgatacctggttttttttcttgtaaaaaacagagactttagcatgtcttcttttaaaaataattgaagcagaaagaaaagagttggaaaagcaagaaacagtaatcctagaaagagtaatcataagaactccataaatgtttatgtgattttcagtgctaagaaagatcgcatttcagcattcttaagaagaaggcaaagcagctgttatctcaaggaagcaaagaagctggttctcagaagagttattaatgtaagatgagaagccagagtttaccatgaaaagctgtcgcacctaagcattgacttaatcagcacgaattattccagctttctttgggaagctattaagttaataccagcaggtggcgctttcaaagtaggctcctgaagctgctgctcttcaggaacttaaagtacacttgctaattataagcattgatgaccgaggagcaaggacctatttgggtggtggtagtgaatgtaaggagctttgatgaaagttatatttttagaaaaacagctaatctagtgtaaaattactattgctatgtaataaattcccccaaacttaatgacgtaagataacaacacaccttaattatctgcccagttcctatgggcaggaattcaggaatggcttagctaggtaattctgggttaggttctcttatgaggttgcagtcaagatgacagctgggctgcagccacctaaaggcatgactagggctggaggattcacttcacatggctctgggcgggaggccgtggttcctttctacgtgggcttctccataggcttcctgagtgtgctcactacatgggggcttcccctagaacaggccgttcaagagagaaaaaggcagaaacagcaatgtcttgtatgacctaacctcagaagtcacacatcttcacttttgctgtattctattggtcagatgaatcggtgtgatacagtgtgggaagggaccacacagaggcatgaatacgagggaggtaaggaccactgggagccatcttggagtctggctaccacatttagccactggatgagtaacaggtattagaattagatgaaggaacttatgctgaacaaaaagcaacattgtctgaaaaagcgtggctcagtggaaccaaagaaggtggttaatgagctgagcttgattcattagaaggtctagggtacagaaagaacagattcaggtgaggttataaaactgtgagagataaagggagagtgagcatctcctccttgtatgttgtttccttttgattcctctaaggaaaatatgcttaactaaattccattattaacactggattttctcttagccttattattttccacttcctccctacttccttatctgaaatcctatcctattccattattatttaggatgtgaagtggccttttgggacatgctattccaacccactgctttggtgactttcaagcatagtttaagcaatggcttccttctctatttttcccagttaccattcaatcttcaaatacaaatttatccacggtggatttgaaccactgtatttcccagaatgtggcttatccagttattctctgactctttccacctctcaccttttcagtttgtcttcccaatctgccatctgcctggtggtcatttcagccagtcttgctccagctctattgaggaagggagaaccagacataagccagactaggtattcaattatgtcacatttattcccaccttgtgcatttgaacctttgcctagaatacacaatagtatataataagaatcaaaatgtgtggactgggatataaattatttaagagtttataaaatacagaattagttacagacaaaaaaggccgggcatggtggctcacgcctgtaatcccagcactttgggaagccgaggtgggtagatcacttgaggtccagagttggaggccagcctggccaatatggtgaaaccccatctctactaaaaatacaaaaattagccaggcatggtggctcacccctgtagtcccagctacttgggaggctgaggcatgagaatcacttgaaccaaggaggcagaggttgcagtgaactgagattgcactactgcactccagcctgtgtgacagagtgagaatccatctaaaaaaaaaattttatatatacatatatatacacacatatatctggagaaggtgtcaaagagaaggtaagacttcagcatggtttcgtatctttcctggcttttttctatggatcccaaacaatcaaatcgaaatttctgcaaattattagatgtgttccctgaagcactacatttttctgagccttagtttactcattggtaaccagagggtaataacacccttctgcatggttgtcaagataagagataatttagcaagttaattatcacaataactgataaatgttggaagctaataatgggtagctattgtgttgtcaccatttggataagctccttaaaggctgagaatacatcctgtatgtctgagtctcataaaatctcgtttaaatgcagtggagtttacaggtcttattgagacgtgattaacatttatggcatttcctcttaattgctagactgattactgagaagcgagaagaatgcttcaaacaacaccggatttaaagtctgagaaggatattttggagcaaagaacttctacaacttatgagataaagaagtaggttacacggaatctactaaaggcaatcaatgccataacaagagacaaaactgtttagagtgccttctaaaaaggattctagtccatttacactcatttacttgttattattaatcagtaaggacttagtattgacattttgttactcgttttctgcttgttttgttggtcctctcttcctttcttccttcccatcttcctttgtgtaaaagtgattttctctagtagtatgttttaattccttgctttttattttttgtgtagcaattataggtttttggtttgtagttatcatgaggcttgcaaataacatctcataaacaattattttagacttataacaacttaactattatcagaaagaaaagtttttaaaaacaagcagagaaagccaaacaaacatctacactttttcctgcattttgactttttgttttatctatttgtatctttttacatggtctgtctcttaaaaaataattgtagttactatttttgataggtttatcatttagtcattctattaagtatatgagtggtttacatactgcaattacagtgttacattattctgtatttctctgtgtaattatttttaccagcgagttttatacttttagattatttcttcttgctcattaatagccttttctttcagattgaaaaaacttcctttagcatttcctataagataggtctaatgttgataatattccccagcttttgtttgtctaagtgtttctccatgtctgaaaaataattgtgctggatataatattctaggttggatgtttcttttcctcagcactttgactatgtcatcccacaagcctgtaaagtttctgctaagaaatctgttgccagatgtattagagctcctttatgttacttgtttcttttctcttgctgcttttaagatcctttctttatccttgatcattgagagttttattattatatgtcttgaagtagtcttatttgggttgaatctgctcggcattctttgatttttttgtacctagatattcatatctttctctaggtttggaaagttgtctgttatcatttccttgaataaacattctatcccaatttttctctctctctctctacatcccctttaaggctagtaactcttaaatttgctcttttgaggctattttctagatcttgtaggcatgcttcattcttttttctttttagttttttcctttttctcctctgtgtattttcatatagcctgtcttcacaaattctttattttgcttgatcaagtctgctattgagagactccagtgcatttttcagtttatcaattgaattttctatctccaagattttttaaaagaaattttcatattttattgataaaataatacgtagtcacaaatattgggggaagaaatgtagccatacacttctttgtcttagtaatctatattttagccagctccagaatttccatttgatttaaaaaatttcaatctctttgttaaatttatctgatagaattctgaatttcttcactgttgtcttgaagttcattgaagttcatcaaggcagctattttgaattccctgtctgattagtcatatatcttcaacactccaggatcggtcaatggtgccttattcagtccattcagtgaggccatgttttcctggatgttcttgataattgtggatattcgtccatgtctgggccttgaagatttaggtatttattcccatctttatagtccaggcttgtttgtccctgtccttgagaaggttttccaagaattcaaaggggattgagttttgtggcctaagcctgtggttactgcagccatctcagcacttgggggtgccctaagcccaggaacactgaaactcttacagactcttaggtacacagccttggtgtatctaagacttgggaagataggggagaattccctgggttaccaggcaaagtctctttctctcttccctctctttcccaaatcagaaggcatctctctccaggcttggctaactggagctgggggaggagtgatgcagacactctactggccacagctggcattacactgggtcatacctgaagcccatggccttccagaccagctctgtattggggctcaccaaggcctgcagccactactgcctggttatgcctgcagctaatgtttattcaaggcccaaggccacattagtcagcagatggtgaatcctgccaggaccaagtccgtaccaaccgggcagtggattcccttctgacccaggatgggcctagaaacactatccaggaacaaagcctggaatcgggggcttcgggaatctgtttgatgttttatcgtattgtggctaagctgatacccaagttgcaagacaaagtcctctgtgctcttctctcttctttccccaagcagaaggaatctctccccaagcatcagtacctgaagtttgggaaggagtgacatacatactcctgtggctgccacagctagtgttaaactgtgttgcaccctaagtccactgcctccaagaccaggacagcactagaccttgcccaaggacttgctaacagaggaaaaaaaatctgtgaaatatttcagagtggaatattttgagccaatatgagtgatcatggtcttgggaacagtcttaagaggttctgaggaagtatgcctgaagcaggtaggttatagtttggttttatacatttccaggagaaaagagttacaggcgaagacataaatcgatacatggaaagtatatattgattcagcccaaaaaagcaggacatctccaagcagggacttagtagttataggtgggtcttaaggattcttcagttgacaattggttgagagggttaagctattgtctaaaggcttaaagtcaatagtaagtaatgcttgagttaaaggaggttgtggggtccaaggttcttgttacgttgatgaatcctcataggtagcagccctccgagagaatcaatggcaaacgtctgtctctttgcagacctttgagatgtcagactctcagttcaactctgccagaactgggaaaagcctagaaagggaaggcctggttgcattaatggagattatctacagatgcaaatctcactcacaaaagatagctttgcagggccatttcaaaatatgtcaaataaatatattttgaggtaaaatatttttattccctacagggtctgctatctgtcatgtgatgctatatcagagtcaggttgaaaagcaaaccatattacagcaggtttatttttatttatttatttattttgaggcagcgttttgctctcgttgcccaggctggagtgcaatggcacgatcttggctcactgcaacctctgcctcccaggttcaagcaattctgctgcctcagcctcctgagtagctgggattacaggcacctgtcaccacacccagctaatttttgtatttttagtagagatgaggtttcaccatattggccagactggtcttgaactcctgacctcaggtgatctgcctgcctcagcctcccaaagtgctgggattacaggagtgagccaccacgcccggactataccaggttaacttttaaaactcatttaatgatattttatggtttgtagggtgtgattccttgcatgaatggcctgaggtcttgtttataatttggtatcttattgccacagagtctgttttgtccgtcttatgatattttaacttgaatgctggtcagttgtgcctaaactccaaagggagggggtataacaaggcatgtctaacctcccttcccatcacggccaggaattcaatttttaagatgtttctggggtctctttggccaagtgggagttcattcagtcaatagggggcaagttgggggtgcttagcattttatgtttagtctacacactttagtccttgtgtcctgactgccactcaaatagactcaggacctcagaccactttagttagccagtggtgaagctagccatgacctgggtttctccctctggagcacagaattctcctctgtcccaaggcctgcctaaatgcactgtcagaattctaggcgcctgcagaattctgtcctgtgttatgttccaccatgacggggcagcactgacttccagtgcaaagtcccacactcactttgctctctctcctccaagcacacggattctctttcctgctgtgcagcctgtggttggaggaggggtggtataggcaatacagggagatcttcccccctacccccaccctatcttcaatgcctctttccttatcattacggtaaaagtaggcactgtgatcactcacctgattttatggcttttatgaaggtgctgtcttgcgtggatagttgttctatttggtgttcctgtgtggagaactatctcggggggggttctattcagccatcttgctccacctccgccctctctccagtcagtctttaaactgctggcaccgaagcctccagtgcctttctcctctatatcccatggagagttactgaagtagttctttttggatttcagttggccttttagtagagcctttctcctaaaggattaaaacgtgagactgcgggcttgagccaaaaagcagtcagagggacaaatactgggttttacttagaataacccacctgcctagtgccagcctaccactcttgaacaaaacttgtatgattcccgtgtctccatttagaataatttaattctgaggagacgcctctgtttctccactggcctctggacatggaacaggcacatgaaaattacctggggcagctatgggtcacatcacctctcttactctagccagccagcaggcacttgaagttcgcaatctgatgggctgaatttctgaaaacaataacaaacacaatgtcacttattttttattctctaaatttacaacccattaatatacctccctgtaagctgtctgattttgaaaattatacatgataaaatctttttattatacataaaaaagagttctgtagtttgtattaatagaaaattggtgtccagacatattttaccaagtaagtacaaaataactaaagaatatccatttgaaagatacaaaattattatcctgctaggagcaccttggtgtcaaggtgacttcagggaataatcaggtaattcagctccttggccggagtgaagaatggaatgttgaggctggagaactaagcagggctcaagaggggcctggtgcactaggctaggtcatttgggctcaatcatgaggggacaattgaggcagcattagcaggaaggtcaggtgaccaccaaactttctgccagatctgagtttcttctcttttagaaatgcagtatttgtataaaaatgaaaggcttaccaaaggtcacattttaaattataaagaaaaaaaatcatcttttttttttttttttttttctgagatggagtctggctctgttgctcaggctggagtgcggtggcgtgatctgtgctcaacctccacctcccaggttcaagtgaatctcctgcctcagcctcccaagtagctgggattacaggcacccgccaccacgcctggctaatttttgtatttttagtagaggcgggttttcgccatgttggccaggctggtcttgaactcttgacctcaggtgatccacccacctcggcctcccaaagatctgggattacaggtgtgagccagcgtgcccagcctcaaaagttcatctgtgagccacatttagaaggtagataaaaaattttgactaaacacagcttagaatctataaattgttaaacttcagttctgttgagaatctttgagatccatcattctctaaatgttttctaccagagaaacaggacaatggcttgcaaatattggttatcagtatttactctatagctcaagcaaacaaacttatttgcacttaaaatacaaatattacctaccttgatttgagtgttgttgttctctcttaaatttcatttcccaaaaatgatggcaaaagtactgtttgttttaacttgacccatcttttgcaacccagcttaatcatttcacagattcccttttgaaataaatgggctagatgatcagacaatagtggcaaatgtttgtcatttcaatgacatatgcaagagatacctttagtgaaatttgtatatcaaatttccctttgtgctccttttttccctagtgaattcagcattaaagtgtttataaatatttttggtttattatttattaattcaaagcaaagaatgccaatgtgaccataaatatctcatttatatatcataaatatctcattatagaaatatgtttagagacatctgttttattattttaaagaagagtacatattatatattaaggtaaaaatagtactaaaaaagagaaggtagtaaataaaaaaattctaatgaacataaaacatcataaaaattaacttaattaaaaatcagccaggcacagtggctcatgcctgtaatcccagtactttgggaggccaaggtgggtggatcacctgaggtcaggagttcgagaccagcctggccaacacggtgaaaccctacctctactaaaaatacaaaaaattagctggatgtgatgggacatgcctgtagtcccagctacttgggaggctgaggcaggagaatgccttgaacctgggaggcagaggttgccctgagccaagatagtgccactagactccagcctgggcgacagaaagagactctgtctccaaaaaaaaaaaaaaaagtataaagataaaattttagtatattgtgaattaattactagactcaattgttataggaagctttgtttttctggagctcttatattaaaattattaaaatcctcactgaaaagtataacatgtgttttctttaaaagaaagatattctatatctgaataaagacaaactttgaacgagtggtatatgccttaataaatattggagaatatctattctccaatacttagagaatgacgacagcatcctccacatggcgttttcattgccagtcacaactttcctccacctagtgttctctagactgagacagaccaaggaacaattccctagacctcctttgcagagctaggttatgctcagaccatttgcagcaccaaggacactgccattcaggtcaccaaaaaaagatcatcttgtgagccctgtctaaaccaggccccttctaaaatcatttcagtgtgaaactgagtccaggtgggtcttcatcagtattagagtggacctgccagatgtatgcttgcagatgatgcaacatcaaagcaaatgccctgggcaagagaagaaaggccaaagcaatgggcttactggtttctagctttgagccactcttcatagtgccaaattcccattttagggtccctttatttgtattaataaaaataaattccctgggtgtaagttcctgtaaagtactccctatctgtattcctgggcatgaaagggtgttttagttccaattctagttttcccacttagaggttcacctttctgacattaataattaaccagattatctgaattcttcaagttcagtttatttaaaaggagactatcctcaaaagtgttatatccgtggtttcctgctacctccaaccatgggccttttgggaatactttgttttttaatcttcctggggaaaacctggggacaggagcaaacgtaagtaaaacaagctatcttcatttttcaatgcatcttagttatgacgaatgaagagttaaatttaacagattctgttaacttgaaaataacttgctacttctgagaacagcaagtgaatagtatcatctctgaatgagaaagtcatggaagcattttgatttgatgagtagctaacaacatgacagcttttatggaattgttatttattaaaatttacgttaagtgattattcaaattcctcttcaaaaaagcacaaaagaaactccagataataaactttcttgacattttttgcttattttaacttggtgtttagttttctttgtgtttttcatagactatacacagttaaaccagggttatttaggagtcaatctaatactgtgatctgaaaatctgttgttgtagtgacttctaccatacatttatgagctgacttttcacaatttttagtgtcattattgagataatatgcattttaagtaatgttttaaaaataatgatcttatatctagaaatattttaatactgaaaagtaactgcagatcatctaatcaaacctattcattttatatatgagaataagtccagataagggaagtgactgaccaaaggtcacagttctagagagagagaaacaggatttttattaaggtctcctgtttatcacttcaatttttttcattttgtcataaatgtatacatgtaaatatattatatataaacacatacttaggatgtcattcttttttagcaccctcgtatttctgatctgtgatctttttacatggccacaagcactcaactaccttagcatcctgcctttattctttttgaaagacgagcagctaaggcttagagagactgaaattaagtgacttcaaattggtggcagaactagggctaggacctgggttccatgattcttgtccagacttattctgaattctttctactagcccttaataaaaattatttcctcactttctctgaagaagtcagagtgtaccatttacaacatggcaatcaatcactttaattaattggttgattgattgattcaacaaatatttattgagcatctaaacatatgataggcactgcagatatagcaaacggtaagacaattcctagagcttgcattctagtgggagaagcaagtaatgaatgaatgaaccaatgaaagaatgtgtaaggtcaggtaggtagtattatgaagaaaaaaataaagcagagtatgagaattaaaaaataattatggggcactattttaaaatgtggccaggaaaggttctcttaaggaggctgcactcaaacagagcctgaaggaagtgaggaagcaaaccatgcaaatatttgaggaaagagcattccagatagaggccaaaataacattcttgcctctctgcaagctcctgctcctctgcagcaattgaaagacaaagaaaactatgaaattatttatatggatagattatgctactgataagtcaataagaaccaaaatctttataaagggtggttccagaatattcttttaggggcttctaaacactatgtatttttgcttgacggctaccatcacatagaccagcagtccccaaccattttggcactagggacaggttttgtggaagacaatgtttccatggaccaggattggggtggggatggtttcagaatgaaactgttccacttcagatcatcaggcattatattctcataaggagcttgcaatctagatccctcgcatgtgcggttcacaatagagttcatgctcctaggagaatctaatgccaccactgatctgacaggaggcagagctcaggtggtaatgctcctttgccccactgctcacctcctgctgtgtagcctggttcctaacaagccatggactggtatttgtccatggcccaggggttggggacccctaccatacacaattcaaaattaaagcaatactaaacttaaaaacataaagcttctataaatactgaaattaaagtagctttatatccctaaatttttctaattacaaaactctttataaattccatttagtacaacagttgaaaatgttaattctggaaacgggctgctcaggttcgatttctaattctataatttgtgaattatagaattcataaatcctatatgtgtggccttgggaaaattaattagcagtttcttcaccttaaaattggagtaatagttcctcacagagtggttgtaatgacacaatgagtttatacaaataaagtattcagaatagtgccttatcacagggcaaaatttcagtaaatatatcttattatcataaaaactgaactcctctcattttctgccatctcctactaggcatgtggggaaggggaattcagatgatggttggaaatctggaaattctttcctctcttttgtaatttgcctgtaagtggatccaaattaattgtaatgcaggataactgtcagatgctttaaaggatttaattgctgataaattaattccattgttactaaaaacttcctgcttttaccagactcttaaaatgtcacaatgttggcagaagcctggaataattctgccaggtggggtggtgggtgccctccaagcttgttgggccacttgaattagtcgatcactatgcccttttgggttaaaacacttttttttcctatgtaatagcgtatgtagttctcgctattcaaattagatactcttgtgatatacacttagtaatccagtttatatttgtaagtttttaaataaaataatttttaaaaatcactcaaaagcatgtatagactcacttccattattgtataaatcacatgaaaagtaaaaataagagaacagtctatggttgtgaataacatataaacttgacctcaactgtacacataacaactgagaactcatataaaggcctcccccatttacttacaaaccgtataaccttagccaagttagccttttaccacttgcaaagtacgaataatgatagtaccagcatcattggcttattgtaaaaattaacaagagctgtatgtaaagtgctgatacagcctctgatatgtggcaagtacttaattaccattattgtttgaagatgatgatttgctcttaaaggaccatcatcactatttccatttccaaatgcacttcccagctcactcatattctatcctttccgttatccgtttactagtataacatagtatttctaagatcactccctttaaactaatttagtgagattaataaatcttaacatgtattgagtactaagagtgctagaccttttcatatatatgttcttatttaatctttaccagagcctggtaaagaaggcgattattttcacagtaagttattttagcctcagaaagacttagtgactttaccacggtcactcagccagcagatgccacagctggaattcaatcactgcttttttcttcattgagcaaaaaatattgaccccatttacatgttctggtcaacatgattaaaagtcttccttggctgcagtagctaagagaaagtgctgctatcaccttaactttctaaatgtaaactaaacctccagcttctcaggtcttaattccaaactacttggaaattatgctgaagttatggtgggtcacaagtacattttgacttattagtatcatttttaagtgaggaaatatatgtattttaaatggaatctctcaagtgagagaaaaaaatcaaaagtaaaagaaaatatgtcatataaagacattgagccttatcttttcctttttcaacagatatgtcatttcagcaccaaaaatattccgtgttggagcatctgaaaatattgtgattcaagtttatggatacactgaagcatttgatgcaacaatctctattaaaagttatcctgataaaaaatttagttactcctcaggccatgttcatttatcctcagagaataaattccaaaactctgcaatcttaacagtatgtatttatcctttattttctttatatatatatacagaatattctcaataaaaatgtgtacaaagtttgaatattgataacatatagatttaatcatttacatccactgtgggattattagatgatgtcagtcactaatgataatgtaagtgaaaattctaacagaaacagaaaattctaaacagaagttatgtctgctttttgagcaatgcatgtccattttcacattcttattggaaaataaaattgtactaatgtgaaaatatttggagataattgaaaatacttgtttgctatgaaaattactattagaaagaaattgagaaatatgagtatgattttatctgtagtacattgcccacaaaaatccatggatattattgaacattcgattgaactctaatattctacaattatagtttcaaaaactaaaaaatttgtgattactaaagtgaatagctctcattgacaacctgcagttaatagaaagaacaaccttgatcaaataactctcctattaagatattgtagtatagattgcttagagacatacttgcaacttatttttactaaaaattctgatacttaataaagaaaatcaaagaatatcagacgtaaaatgggctctgcagttcatttagaccagagtttctctaaagtgagttctttataaagaaattaaaaatggaaatttaataaagagcttaaaattcgaattatattgattttgtaacattttgaatttattttataaatttgttttgagtttttaattatacaaaaatcataagcataagattgtaccgttttaagtttgtatatatttaagtatctttgtatcaaaaattattttgattatgttataaataataaaaagccaatgctgagggtcctccatgacttttgtcctttaaaaggactatgcatattactcaagtttaagaaacactaatctaaaaaatttctagtcaaacataggaattctttaatgttcttagcagtaaatgctcatatctcttaacaaattcttccacttattaggtttgttaacaattaaaattcatttattaaaagtgttacttttatggcatatgcctgtaatcccagctactcgggagactgaggcaggagaatcgcttgaacccagaaggcggaggttgcagtgagccaagatcgcgccactgcactccagcctaggcaacagagtgagactccatctcaaaaaaaaaaaaaaaaaaagaaagtgttactttcaaaagacactcttttatctgatacaatgtatttgtggctcttagttttaaatttaaatcaaacaaatttaactgaaattaaaaatgcagtatctcagttgcactagcaacatttcaagtgttcaaatagccccaggtagctattggctaccatagtaaacagcatagatatagaatatttctgtcatcacagaaagttctctgaacagtgctgacctatatgattaactgaaaaactagattaaggtggggcaatcatagtcaatacatattttaaccatttaattttatcatagcaatatcatgtatctttatttgccaattgtttaatgttgtaccaaggtcttttaagtgtgggtctatggattgcagtgtcaaatctcatttattacgtgctacaaatttaatggatcatctttgttctatagtttcttttttgttgttgttgttgttgttgttgagacagggtctcgctctgtcacccaggctggaagacagtggtgtaatatcggctcactgcagccttcgcctcccaggttcaagcaattctcccacctcagcctctcaagtagctgggattaacaggcgtgcaccaccacacctggctaatttttgcatttttaataaagaaggtgtttcaccatgttggccaggatggtctcgaactcctgacctcaggtgatccgcccgcctcggcctcccaaagtgctgggattacaggcataggttactgtgcccagcctgttctatagtttctgtttcttaaaaggggagaaagaacttaaaggcacttacaaagcaatctgggtgcagaatatttatagatttttcttgttttccaaacttttacaataatttcgcatagctaattctacagcagttggtttttgtaattaactttcatcccgtgtttccaaagcctaatttttcatagatacacttttcttttttatcacttttcatgcattaaatttacatatcattgaatgtaaaggggataattacaaacataaattggaaaatgagcatctcaactcaggggagcagaaatatgtgaggtaatactaagggtccagagatgctggacacatgggcacggtgactgatgcctgtaatcccagcactttgggaagccgaggcaggtggatcacttgaggccaggagttcaggaccagcctggccaacatggtgaaacccgtctctattaaaaatacaaaaaaaaaaaaaaaaaaaagttagctggacatggtggcgcacacctgtaatctcagctacttgggaggctgaggcaggagaatcacttgaatctgggaggcagaggttgtcgtgagctgagatggcaccactgctttccagcctgggcaacagagtaagtgagactccgtctcaaaaaaaaaaagctaagggtccagagaatcggtcaggaggtttcacaaagggaatggggagcatggggtaacccagcaaactaattgagtgaaggtttcttaaaggcttttatagtagtagtttcactaaatgtatataaaatttaggaaacatggaaccaaagagactttcaattgcttaaagctaaatttttattatgtaattagacactgaagggcttcgggcaaaatttatttactcttcttgctcctgtatcactttttaaatgattacatatacatactgattgttctaatgagattacagttgtatttagaaagttaatggtttaataactttagaattattatactttttccatcaacaatttcttttccagatacaaccaaaacaattgcctggaggacaaaacccagtttcttatgtgtatttggaagttgtatcaaagcatttttcaaaatcaaaaagaatgccaataacctatgacaatggatttctcttcattcatacagacaaacctgtttatactccagaccagtcaggtagattataagatatttcttcctctgggtgggggatttgacagtattgacactatattgtagagctttttaatacctgaaattgagtggagatcggtttctttttaatttgctcaaaagactctcaattcccaaagacatctatacttacaaatatttaatagcattttaattttaaatttatggagaaagtgctaaataaattacaaaaccaacaattacattacctgccccatcacttatttccaagtagaaaatgctttttcaaaattgtaaaatgttgaatgttatgtaaaaatgtaaaatgttatgttgttacaaaaaccaactgctgtagaattagctatgcgaaattattgtaaaagtttggaaaacaagaaaaatttgttttccaatatgttacaatttattaaacaaatataagacttaattgcaaatataatttggcaatgggaaaatataatttattgtagaaccatgttcattaaaaattccactgggtctggagctaatccccaaactggaaaaataaatctaacctaggggatcagatatttcagcagaggataaactagatcacagaaatatatggatattaattttcaaaggggatctacctaagaaagttactgttagaacattgtttaacattcatggttcttctgttagaggcaaaagggcagaatagccaatcaaaatcatgtgaataggaatgactggacctattcccaatgaaccaaaagtaaaacacagaaaagtatgaatgcttcccaatatattcatgtgtttgcaaagccttccattcccccgtttctccctctcgtcatcaatgacttttaagtacatcagaaatagaatattagagatgtatatatgggaaggagaggctatggaatttcattaatgatattcttggaggaggacagagaaaggaagtggggaccatctgactttgttgaaaaactttgtacacagtagatatttgctaaatgttggttgatgttgatgatgagaatagtggggtggaactggactgaaccattaccgtttcagcaggagcatttgttatgatcagctcagaaaggaaaagcctaaagggggtggagatattgctatctacttggccagaataaaatctccagaataatagcatcttttttctccaagagacaactttttatacaaggaaatagtctctgcccacaaaggttgggtccttttagacataatcatacctagaaacaagcatatcatctctcttgtcctcctcctacattgaaggattcttttttgcttggatcctgttgacacgtcccacaactaagggtcatcagtctttgtccagtaagcagtgtaatatccagaggctgggaccttcctcggttatcaaggctttccttaagaatggcttcatgtctcatgcctgtaatcccagcattttgggagtccgaggtggggggatcacaaggtcaggagtttaagaccagcctggccaagatggtgaaaccctgtctctactaaaactacaaaaattagccaggcactgtggcaggcgcctgtaatcccagctactctggaggctgaggcaggagaatcgcttgaacccaggtggcagaggttgcagtgagctgagatcaagccactgcactccagcctgggcgaaagagtgagacttcgtctcagcaaaaaaaaaaaaaaaaaaaaaaggcttcatgtattatttctctatcaggactttactgtaagatgatgtaatacctggccaggcacagtggctcatgcctgtaatcccagtactttgggaagcccaggcgggtggatcacttgaggtcaggagtttgagaccagcctgaccaacatggtgaaaccctgtttccactaaaaatacaaaaattagctggatgtggtggtgcacgcctgtaattccagctactcgggaggctgaggcatgagaattgcttgaacatggcaggcagaggttgcagtgagatcgcgccactgcactccagcctgggcaacagagcaagactgtctcaaaaaaaaaaaaaaaagagaaaaaaaaagaagacgatgtaatatcctcatccattctaatcgtagagtaaaatgagagaagtttgctataaatattggcccatttctgcaagatagtgaagtaaattggttaaaagcagactctggagtcagattgtctgggttcaagtcacagcttgagctgctgtgagctgtatgaccctgtgtgaatcactcagcctctcagactcccactttcctcacttgtaaaatagagataataatacaacttacctcatagagttgtgagaattaactgaattagtatgtgtaaagcacttaagatagagccaagcacacagtaagcactaggaaagtgttttccattattatctatggaatagcacaaagccatatttacagaaaagaaaaataattacttaaaagtattttttaatcgtcttgttatttatagctataatgtcccgatcaacacatttaatctgaagattcttgagggatttttagtgtaagcatctttaggataaaggcttcaaggctttactggataaatgactttagaatattgcccaaaatccttcaatttcataaagcctgtgtcctgccttcttccccagcttcatcacctactacggccccaccctctatagacacaagccaaactgacctcctttcagatgctttctcacaccgtttccccatccatattaaggcctgtgtaacatgctgttgcctctacatggtacattcttgcccctcctttgccttgttaactcctacttcaccctcacgtgtcatcacagatccttctaaaggcagctttcgctgatttccctgacctcttcaaatctccctcttctacatgctcataaggccaggcaaatatcctttgtggcacttcacaccctagaattttacatataattgtgtttgcctctttcctccacaccattaaaagatgtccatgtctgatttgtttcactactgtatctcagtacgtagcataatgactggcacattagaaggcattcaaggccgggcgcggtggctcatgcctgtaatcccagcactttgggaggccgaggcaggcggatcacaaggtcaggagatcgagaccatcctggctcacacgggatgtgagctaatacaaaaaattagccaggcatggtggtgggtgcctgtagtcccagctactcgggaggctgaggcaggagaatggcatgaacccaggaggtggagtttgcagtgaaccgagattgcgccactgcactccagcctggcattcaaactttttttaaattaataaaccacatcttttatttttatttttatttagtgagtgtctcgctctgtcacccaggctggagggcagtggtgcaatcttgtctcattgcaatctccgcctcccaggttcaagcgattctccagcctcagcatcccaagtaagtgggattcaggcgcgtgccaccatgcctggctaattttgtatatttagtagagatgggatttcaccatgttggccaggctgggcttgaactcttggcctcaagtgatccacttacctcggcctcccaaagtgctgggattccaggtgtaagccactgcacccggccaataagccatatcttttatacaaaaaattgtatagatcttgcctccaatgtaccatcgctgtgaagacaagattaattttctaacctaaacacaaactgggttaaaaactagccaaatagtagtaacagaaataataataaaataaacatttattgattacttagtatgtgtcaggctatgcaaaagctttgcattatttaattctcacaaggacactatgagcacacactagtattcctgttttacaagtgagttaactaaggtttagagggattaagtatcctgctcagggtcatactaaaaagtggcagaggcaggagtgaaaccaaagtgtttaattccagggcctgtgctcttaacttttgtgactttctgacttgggcagcttcccagtgatactcaggcctagactgggtgtgtcccaaaaagcaggagataggatttgtggtgggagacaggtgtgaggggaaggagagagcagagaggtggggcatttactgagcacattgtttttatcttgtgaacttagtaaaaccagtgttaatgtggcttcttatatagagctttgcataatactgatcttttaaaagatactgggtttatggtgccagttctattttattttgtgggtaaagttttggccatgaaatgatttgagcatcagcaacaccctagagaaattaagtttgtcattggaaagaattagatcactgtgtctcaaacagctgtgagttaaaagcgaaacagatgcttttgtttaaaaagtagggatctattaactgacagaaagaaatggaagagaactaacagttattgagcccctgccattgctcttttaacaatgagcgaacaagtgtaggatctggctcaataaatagaacaaaaccatataatccaaagctgccttttgcaataagagctaatttggagccttgtgggttttcataagtggaagagtgtatgtctgaatcaagctcccaattttccattaagatcttcaactctgagacaatatattatgctcctctataaccatatggtgatgtcactattttgctactatgaaattcttaataaataatggcctaattacagatgtaattaatttcatactgtgaatgttttctcaaaacattgtaggtaaatgtattttaagaaagtgaactgtactttaaatccactaagagaaatagttctttaaaggaatccctgaggattctcttaaataagagaatctttagtaatgtatatgtctgcaaactaatttttgtttttttcaaatatggacttttgtgtattgagttttttaaagtaagattcatctcttttaaggatggttgttttaaaaaatcaaaatatccttgtttttagcagagtttttgattatatcaattattcttacagtaaaagttagagtttattcgttgaatgacgacttgaagccagccaaaagagaaactgtcttaactttcatagtaagtattttatttatttaaataatactttaattcatttttcaggacaagaatctcatttcataaccctgtcctcacactacactaaatcattcaatgttccataaatggttattgaacatctgcaatgagtatagaatcatagatctatacctctgtaatacacgtatgtgaaaggctcatacaaattaaatttcaataacttgaaggattttgagctaaaccatttaagtacaatcttgctgatttattttttaaagaacacccactggccgggcgtggtggctcacacctgtaatcccagcactttgggaggccgaggcaggtggatcacgaggtcaggagatcgagactaacctggccaacatagtgaaacctcatctctactaaaatacaaaaaattagctggtgcagtggcaggcgcctgtagtcccagctactcgggaggctgaggtgggggaattgcttgaacccgggaggcagagcttgcagtgagccgagattgtgccactgcactccagcctggtgacagtgtgagactccatctcaaaaaagaaaatctaaaaaaaaaaaaaaaaccaaaaaacaaaaaaccacccaccaatcactaagaattgactgaatacccatttaactataagatatacataatggatatatctattatgtatttattatgtgcaaaagaactatatttaatggtacttactcttaaggaacttagagtttaataactattatactaacacaaaaaatcttgctaaatcatgagttaaagattggcagtaattcaccatttatcagacatgacatatgtaacagacgctgtgcattgaactcccatgatctcatctaatttgtgtcacataccccaaacacttttgtgaggaaataaaataatacaactagttataactgctcagttattaacagtaggtatactactaatggtccttcaatataggctgcagcacttttgctgctactcaaaaaaaaaaccaaaaaataaaaataaaaacttatcagaatgcaggtgcaaaagcatagatactacagaacaaaaccatactaaaatataaaacaaataaattatacagtaggacaaataccatgagctcagagggaagaccaatgagaggtgagagtgggggtgatacacatccttctctggaacggagtagttaaagggaaccctgagttgggtgttaatgaaaggaattgacataaattatttaaaaatagtgaagaccatccatgtaagaaacagtgtgagttaagctatgggggcaagaagaaataaaaaaaaatgaagctagtaaataaactgattgactgatagaatgtctgaaagagaactaaggagagcaatgtcagctcaaatgccctttttctatcagggaatgataggggtgtggatgtatgctctttatccaacgtcttcatggttgaacttaagtgatgcagaatcatggcataacctgcagaaaaatgaatgtcagtcatctcttgtaagagctgccccaggaagaaaagattgagaaagctgatcccagagccttaaggagttaatatagaggaagtatcctcaaaatagtacctgagaaagatgatcttagaagaattgtgcacaatggatagtgcgatgaagaagagccataaaaatactcagctacaagtataattcttgttcaaaataggcttctgtaagttttacaattaattacgaaataaaacctctaaaatccaactgtgaatttcagtcatggtaaatggtgctaagattttttgctttgggttttttgttggtttgtttgtttttgtttgtatgtttttgacagggtcttgctctgtcaccaaggctggagtgcagtggtgtgatcatagctcactgtagcctcaaactcctgggctcaagccatcctcccacctcagcttcctgagtagctaggactacaggcacccatcaccacaccctgctaactctttaaacatttttttgtaggctggtcagtgactcatgcctgtaattgtaatcccagcactttgggaggctaaaatgggaggattgcttgagctcaggagattgagaccagcctgggcaacctggagagacctcatctctactaaaaattaaaaaaaaaaaaatagctgggcatggtggcatgtgcctgtggtcctggctacttgggaggctgaggtgggaggattgcttgagcctgtgagttcaaagctgcagtgagctatgatcacaccactgcactccagcctggatcacagagcaagatccctgtctcaaaaaagttttttgtacagataggggcctcacttatgttgcctgctatgtttatgtgttgagttaaggctgaattggacccccatgtgtagtccaaagaaagtcaaaacctcatttcaattatttgctaacccaaacacaaaattaagtttatggggaagctttacgagaactgtcaagtttgtttaaccatttgagagttttaccaagctgaaaaatgcccatactatacatttataaaacatctggctaaaaaatataattcatagaatatttgcttttgaaagctttaaatgaacatatataaaaattagattctggtgtttataaagccaacaaaattcacatttagtttatcaaaaacatcattgtttgtttgtttgtttgtttgttgttgtttttacgtgttgttacacttcatcttttagatgtacaacgagagttgagtctcttcaagataatgaggagagatggggaagattggaaaaagaagaagggaaatggctgaaatgaaccatatttcccttctataacatttaacagatcttcatccttcatatttaatttgaagacatgggtatttgtcttcaaatatttgatctataaatattttgtacatcaaagattgtataatcagttaaattttttaaaatgtagtttctggcctttgagggtgtttgtttttatttacaggatcctgaaggatcagaagttgacatggtagaagaaattgatcatattggaattatctcttttcctgacttcaagattccgtctaatcctaggtatgtaaaaatagttgttaataaaaccacatacggaacttttggtgaagaagcaggtaaccagttaaagggggccacctaatgttaacaaagggtgtcacataggtggatatgcaaaatcttttgaagttctagcaagaacttaagctctgttcttggcaaaaaatttccaatacttctcagccattctttttacatatagaaataaaaattgggaagaggaaaaaatagtacccaggtttttttgtcataaaaaacatcaactcctacccctcaaagtatctaatagattgtcagtttaaaaggctggtgtggtcttgttccttgctctggttgctataaaatagggtcgtctgtagtttttgcctggataaactaccagaaggcaaagtccaagagggaaggagttctcagagctatatctattatttggcctcacatgaaaggatttaagaaaaagtttaaacagggttcaatgtaataaatattcaatgaacacattcttggtatgtgcaaatcacaataagagggagagatacaaaataaataatccacagtccctgctttcaagaaatttgtaataggccaggtgcggtggctcatgcctgtaatcccaacgctttgggaggccaatgtcggtggatcacctgaggtcaggaatttgagaccagcctggccaacatggtgaaaccccgtctctatcaaaaatacaaaaaaagccaggcgtggtggcaggcacctgtaatcccagctactcgggaggctgaggcaggagaatcgcttgaatctgggaggtgagggttaaagtgagccaagatcatgccactgcactccatgttgggcaacaggagcaaaactccaactaagatagaaagaagaaggaaggaaggaaggaaggaaagaaagagggaggggagggaggaaggaaggagggaagaaaagaaagaaagaaatttataatagagcagaatgaataagacaagtgcatctatacatggctgcactagaattttagaacaacatctttttatggtcatttttcctctgccctcagttaattcgctgactgaaatttttctaaaaatttaaattgaatttggaggttttaaataacttggataatttaaaaattgtgtacattcttgaaaatactacatgttccatagtgcagaattaaacctattattttattactgctatcatttctccaacttcatcttgtgccacttgccccatggcaaattatgtgctagccatggtctggcatgtccagtgctttcctacctccgtgcctttgcacatgtcatcccctctacttggaatgggcttcacctggctcttcataagcctggcttcttttcattgttatgacccagagtagaagctactacaaaaaggctattcctggatgcatgatgtaatgtaatctcttgctttgttttactccctatctcagcatcttgtttattttcttcatgacacttatctcaatgtcataatcatttctttacttgcttgctggcatttttattccccactagcttataaactctttaaggtgggccttgtctgtattgcacaccagcagttcaacataataggcccttgataaatattcattgaattgatgatgatggtaataatcattattataatactattaacatttgtggacttcatagccaatctgcaaggtaggctcagtatatatatgtgtgtgtgtgtgtatatatatgtgtgtatacacacatatatacatacatacacacacacacacacacacacacacccatagtttttttgaaacagagtctcactctgtcacccaggctggagtgcagtggtgtgatctcagctcaccacagccttgatctcgcgggctcaagcaattctcccacctcagcctcctaagtagctgggactacaagcatgcaccaccacaccagactaatttttgtatttttttgtagagatggggtttcatcatgttgcctgggctggtctcgaactcctgggctcaagcgatcctcctgccttggcctcccaaagtgctgggattataggcatgagccactatacctggcctagtatatgtttttgaataaaggttattaattaaagccaggtcattttcatcttttaaaaaccatgctttgtttccaaccataaattcatttttgtgaggtgtaaattttatcatctgtataagcttgtcttgtattatatgtttctagagacgttattatggattttgtactgtattttggattttagtattatgttagcataattaggctccaagattaaataaattctcagaaataataagttcttcaaatcaaaactaatgactgtattaagataaaataccaggaaaaataatacaatatatgaaaaactggttactaaacaatatctattatctattatcctaaaaatgctcaattatttattgcttaaaaatcagtcacaaataaaatatattacttaggttttatatatctttgtgtattcttccctctttaaaacaggaatttattagatctcctctgagtgaattaaaaacatttgatgacatctataattttaaatattttgcttccacagatatggtatgtggacgatcaaggctaaatataaagaggacttttcaacaactggaaccgcatattttgaagttaaagaatatggtaatttctgacaagtaaaagtttttctttgctttttgttttttgtttttgagatggagtctcgctctgttgcccaggctggagtgcagtggcacgatctcagctcactgcaacctccgcctcctgggttcaagcaattctctgcctcagcatcccaagtagctgggattacaggcaccaaccaccatagccggctaatttttgtatttttagtagagacagggtgtcaccatcttggccaggctggtcttgaactcctgacctcgtgatccacccacctcggcctcccaaagtgctgggattacaggcatgagccaccgcacccagccaattaaaagtttttctataaaaagttagtgttttgcaataattctttttaataatgtagttaatgcaaaattattcccagatgaagatgaggcagcctgtacgtatggctagaagtactggctagaggttggagggaggagtagtagttgaatgcctagattctagttccagcatgcctttaaccctgatcaagcagaacaacctctgtgtacttgtgttccccatcagagagctggaagagatctagtcccctgaagagcttgactagtaaagatcctttctagaattgtgattattattaggagaaacttaaatagtcatagatgaggtgagtggaacccagtaaaaccaataaatgatttacttgagtcttaaaaccaattagtgacaaaacaaaaacaacaattaggtttccttacccctagtccaacactattttctggctcctaaattcctaatatattcatttgaatatttaagatattcttattttgaaataaattatattaatagactaacaagtaacgtaaatagtttaatctttcatttcttatagtagtttactagcatttctgtgtgctctgctatcaaatttaactttcttctgcttgaagccattttttattccctcaagagattcataatgacatggagaagaataaatactgacacaaattttaacaattaacaagaaaaacagtgacaaaacaaattcgttatgatgaaactcaaccttaaagattacaggctctctgtaacatataatcctaacccatctcccttcttctaagtgtttttgtattttctctgtatatctagaatccacccacctcttactgtctgtagccactctcatcaattcatcagcactctccctcctggactacagcaaaagcctcctaactgatgtctctgcttccaagctatcttgcttggtattagccaaaataatcttgaaatgcaaatttcattatgttatgtcacaattgaaaagtttttttgttttcaaggaacctatactctaatggaagaaataacctattgcctataataaatgctgtaatcaaaatataggcaaagtgcttctggattgacctctgattgttggagtgggaaggttctgcagagattgttgttggtgatgacgatgatgacgatgatgattatgataataaagtggatgttgtgttgatgttacagcttgtccaactataccagaaagtctagctgtttgctaggctttaaagtctgctctaatcaaaatggtaatattacctgtttgtttttattttcagtcttgccacatttttctgtctcaatcgagccagaatataatttcattggttacaagaactttaagaattttgaaattactataaaagcaaggtaagaacatttgtttttttgttgtttttatttttatttttcaaattaactcaactctggttgatgatagttgcccaaagtgagatctgtgatttattatcaaagtgtgccatgatttggggactaattgataaaggagacatcatgctggtagttcatttgcttattctgattttagctgattctgagtttagctttgttggctattcaacagcaaaaacaaagaaaagtgccaaagatctaagtttggtgtatgtgtttagaaactagggtaacttagaatattgggactgagatatgaaggattcacttcctatctttttttaatgatttaatcagccagctaatgctgcgtaactacttcaaaacccagtgccttgaaactcccacatttatgagtcagctgggaagttctgctgatctgggccaggctggtgtcagctgggctcacccatgtagctgcagccagttggtaggtcagctgggggctggctggtctaggaaggtcctgtccatatgtctggcagttggatggggctaaaagtgtgtgtgcctctcatcatccagcaggctagcttgtagcagcagcaacactcaaagaggcaatggaagcatgaaagtccccctgagcctaggcttggtgctggcacaccatcacttccacacattcttttgtccaaagcaagttacaaggtcagcccagaggaaatagacccctcccacactttgtggacacaaggaactgtgcaaaggtcgttgatacatggggaggtagagaattgggggttagttttgcaagcaacctatcacaaaagcttaggtcattttaaaattacaatataatgtagttataccaatctatataactatatgtgtggggtactcttctaagtactcagcatatattagcacatttaatctttacaacaactctatgcgttgatattgttactattcccatgttacaagtggaaaaactgaggtacataaatgtttaataatttgctcaaaatcatacagctagtaagttgcacagcctgtctgcttccagagtccatgcctcaaacattaccctatgctagctctcttattagcattgatttgaaaaatagagtgtttattacttggtctaaaccagcataaaaggctcacttgagagaaaattatagaaactgacctcctataatggggactatttattcaaaccataaataaggaaagttagctcttgctatagtattatttgctgggtagaaagtttactttattcttactttaattctaaactaaaaagggaaacatgcagtttaaattttttatgaatagatctcatataacagtgagattggacacgtaccttttaaaaacataaaagaaaacagagagtagctgatatcaaaattatcaaggaagtaatttggcatataggagagggccctgattctaagtcttgtgatctccccaagatcaatttttttcatctagcacatagctttattaatgtggctttatgaggatgaaatgtaatagtgcatgaaggacactttatttattattattatactttaagttctagggtacatgtacacaacgtgcaggtttgttacataggtatacatgtgccatgttggtttgctgcacctattaactcatcatacattaggtatttctcctaatgctatccctccccgtcccccaccccatgacaggccccagagtgtgatgttccccgcactgtgtccaagtgttttcattgttcagttcccacctgtgagtgagaacatgcggcatttggttttctgtccttgtggtagttcactcagaatgatggtttccagcttcatccatgtccctgcaaaggacatgaactcatccttttttatgcctgcatagtattccatggtgtatatgtgccacattttcttaatccagtctatcattgatgggcatttaggtgggttccaagtctttgctagtgtgaatagtgctgcagtaaacatacgtgtgcatgtgtctttatagcagcatgatttataatcctttgggtatatacgcagtaatggaatcactgggtcaaattgtatttctagttctagatccttaaggaattgccacactgtcttccacaatggttgaactagtttacactcccaccaacagtgtaaaagcgttcctatttctccacatcctctccagcatctgttgtttcctgactttttaatgattgccattctaactggtgtgagatggtatctcattgtggttttgatttgcatttctctgatgaccagtgatgatgagcattttttcatgtgtctgttagctgcataaatgtcttcttttgagaagtatctgttcatatcctttgcccactttttgatggggttgtttgtttttttcttgtaaatttgtttaagttctttgtagattctggatattagccctttgtcagatgggtagattgcaaaaattttctccattctgtgggctgcctgttcactctgatggtagtttcttttactgtgcagaagctctttagtttaattagatcccatttgtcaattttggcttttgttgccattgcttttggtgttttagtcatgaaatccttgcccatgcctatgtcctgaatggtattgcctaggttttcttctagcgtttttatggttttaggtctaccatgtaagtctttaatccatcttgaattaatttttgtataagatataaggaagggatccagtttcagctttctatatatggctagccagttttcccatcaccatttattaaattgggaatcctttccccatttcttgtttttgtcaggtttgtcaaagatcagatggttgtagatgtgtggtgttatttctgaggcctctgttctgttccattggtctatatatctgttttggtaccagtaccatgctgttttggttactgtagccttgtagtatagtttgaagtcaggtagcatgatgcctccagctttgttctttttgcttaggatgaaagacactttaaagtgcctcaagtgctttacgtaatttcaaattgttacattttatctgaatcctgttattgtaaccatgttagtaaaacagttttatgctattgtctgacagatatttttataataaagtagtcactgaggctgacgtttatatcacatttggaataagagaagacttaaaagatgatcaaaaagaaatgatgcaaacagcaatgcaaaacacaatggtaagatgttaagacacagtcactcacacctacagatgcatccagaggtgagagatgagaagttacttaaaaaccatctagtccaatcccccattttagataggttgaaacttaaaatcctccattggcttccctttgcctttagggtaaagttcattttccttggcatcagcctcccttaccagctgatctcatgccctttcctccctccctcccctttgtattaatcactccaatttctctaactgaccaaagtctctcttgcctccaggtctttacaatatcatttattctgcttgaaaatgctctttcccattgtcacctcctgccccttctttgcctggctaattccttctcattctttaagtttcaacattgacagcctttctctgggaagcctcccctgactcttctacactaggttagctgccccggctgtatagcctcttttcttaacacattcttcacatttcattgcagcggttctcaactaggggtgattttttattcccaaggagacatttggcaatgtccagagacatttgtggttgctactggtgtttactagggagaggccggggatgctgctaaattcctaccatgcacagggcaggcccctacaacaaagaattatcctgttcaaaatgtcaataatgctgaggggttgagaaacccttctttactggaatggcttgtttacttatctatcattttcaatattaaactatttgtgagtctgaatcatttcccttatatgcccagagacagcatagtttcttgcaaggaaatattcatgaagttatttgtccatagtttagggctaatgattgctggaactgagattagggcgctggttccctttcccttattcagcattctttacattataccacagatgatatgagttcatgtcatttttgctcactttttcgtattcatttggtttgcatcatcaatcatttatcctctacaatcttattaattcaagatgtaaattaaatgcatttttaaaatgcaaaattctatgctagacactgggatgtaaagctaaataagacaaaaatgcctgccctcaagtcgctcaattttataagaaaaaataaggcaaagtttattttactgttgtgttaataattaaataatataatatgacttaaccccacatccctttactcattgtgtgttttaaaattagtatttaaatttgtaagcagtgaagtacaaattaaatattataaaaaccaacaaactctcagttaagggcggaagtacgctgagaggcctataaagatgaatgatgacgcaggaattggaagaagtcgtgtttgtcagctattaccaaaaagacctgttggaccatgtgatgttcaagacccttctacttctataattctatacaaataattagaaaataacatcctgggcttaatcgtggactcggttatctactttacttttgacactaaaccattcttctgacatttaccttcaatttagaggttagtaaaagcagattttattaatttttccttataagttcttctccgaaataactcctcctttttctccttttaaaaagttgataaatggaattgctcaagtcacatttgattctgaaacagcagtcaaagaactgtcatactacagtttagaagatttaaacaacaagtacctttatattgctgtaacagtcatagagtctacaggtaagtgtgtgtgtgtgtgtgtgtgtgtgtgtgtatactttcttttgaaaaatatttagacagaatattaaagatataaataatttccaatttctataattatttcacattgtattttctttcatagttaaatataattataagaagtagacttttatatagttataaaaaggcagtagggctctgcttctttttagtcattggacaagccattgggtccctattacctccacttctactgcaaaaatgggaaaacagtacccaattcatgtccaaagtagttctgcaggctctctgccttgaccatttggcaccctagtgtcctcacgtggtgaaaatcaaaaccaaaataagattatgtgtgtaaaactatttgataaagtactatacaaataaaagttattactattatcattattatagtctacataatgatggagtcaaactgaatgtttcctaaagcctaaagttttcaacattattttaatgtttcttctttttattttttcctcaacttattttaaataagttcagtttaagcagtatctatgagatatttaaagtattgccaaacagacaggcttgcaaacattaatgatgtatgatgccagcactaaagtggcttacaaattagcatcaggtataagacaggtgaagaaagaactgttgcaagaaagaattccatatgagctctaagcaaaatattaatgcaataggattcagaggaaggtgagcttctagatgattgttgagcaagcaagaacagtgttgtgaagatgatcagtcttgaaaaataattagggttttgaggcagagttgctagacagggtgaaatagaaaccctccagagagagggcagatgaagaagagtagatggtgaagcttaatctttgaggacagcagatcatccagtttggctaaaatataggatatgtatagaatgtattagagatgtaatattggaaaggagtttgggaatattaaagcttcaaatgttattcttaatagtttaacttaatctttacctggaggataacattattgggctcttgccagttgtctggtcatgtccccttccctccccctcccccctcccgctcccctccctcccctccccctcccctccccctcccctccccctcccccctcccgctcccctcccctccccctcccctccccctcccccctcccactcccccctccccctcccccctcccctcccctccctccctcccctcccgagtcttgctctgttgcccagactggagtgcagtggtacagtctcagctcaatgcaacctccgcctcctgggttcaagcaattctcctgcctcagcctcccgagtagctgagattacaggcatataccaccatgcctggcactttttttgttttcgttttttagttttagtagggatgaggtttcaccatgttggcccggctggtctcgaactccctttcagggttctttctatatcaagctccctttttctgatttctctctatgtatctatgctctgtgaacaccaacccccatcccccacctccacttctgtaaggctcagtttctggcctgacccttccctctctcctcaatcccttgaatacagtcaactgaaactcaggccactgatgaaaagtggtgtcccttcctggcatccttcctcagtccagtcctgtagctctacttctccaagggcttctctacatacgagcttgtgcataaggccttggaaactcctgaggtctaaactcttctctgctgtgcccctctgaagcaagacctatgtcctacttactactggtaaatgaatgaatgcaagaatggagtgagtgaatgaataagtctgtggagacatatagagatgaaatggatatccatacagatcatgatactcctaaaaactgtcaacatgatgcttgccatttccttaggtggattttctgaagaggcagaaatacctggcatcaaatatgtcctctctccctacaaactgaatttggttgctactcctcttttcctgaagcctgggattccatatcccatcaaggtagattgggtgagggggtagacgttgctacatatgatcatcttgttctgttcatggaaaacatgtgggtggcaaacagggtaagaatgttgccatgaagtcacagagggagcttattctgtgaaacctgcccctcctggtggacacagacagggatgggaaattgaaggtcagctgcagccttggcaatgacttcaaaagtgagggcaagatagccttgtattaggcatccctaaataagcattaaattacatgtaataaataagcattaaattatatgtaaataaaatctcataagactctagttcaaaaatacaaacatttaaaattatttggtggcaaattcttaaaaagccttaagatggagatatcattccttgaaaatagactcctttctctcactatgtttttgcctccagtgtgtctcatttgtttccctctgtctctgtgttgtctttgtgcataactctgttcaatctctcgtctctgtattgctctctgttcttttcatttttgcttctttccgtccctgaatctctttttttctgtcttttttgcttactcctctgcattcatttttctctctttcaccttcttttcctcctctaaatgctgacagtatagaattgaaacattcatgtggtttttagatttttatctatcattatatattttattacaaataatatattttattatgttgattaaatggaaatgtttattccctgcccttaatttagaaatccagagcaaaatttttttttgttctttgaaaatgtgttactttttaaaatcaacttaagtacaatcaaaatgtgttatttattatttactgtgggtcatgggcttttaagaaaaaaaaggatttaccaagcccaaagcaaggtttggacatgcttgtaggttcttacatatatatactatatatagaaaataatatataacaaagtatcatataatgcatatacagtaatatataatatatatactaaaatatgtaaatatagcaatattatatagaacataagcttaaaatatgtttatataaaagtaaaataacaaactatatctgtgtggaattgtgtgtgtatatatatatatatatggcagtgagaggtagatgttaaaggaaaaaaggtgtatctatttttgtttctcatattcaagggacttattcccagaagcgattgcctcattttctcctttatccagtcctaaaccaatcaaagaaatacagaagttagatagcagaagaccttatcacacctactccttgactgacttaatagaatgatatttatgttttgagtttgcttgatttatgggagaatctattcaagaatgatttaactaaatagaattaaatctttctataagctgagaatacacttctctttactaaattaaacataagtaaaccaggtgtggtggagcatgcctaaatagttccagctacttgggaggctgaggtgggaggatggcttgaggccaatagttcaaggttgcagtgcgctatgattgtgcctgtgaatagccactgcactccaacctgggcaacgtagtaagtctctgtctcagaaaaaaaattttcagaaaaaaatacataaataatttatactttggtggggaggaaggaaaattatttcagaattgtgctttaaaataagtgatgagctgttgaaatagatttggattgttttgacaaacaggtgcaggttaaagattcgcttgaccagttggtaggaggagtcccagtaacactgaatgcacaaacaattgatgtaaaccaagagacatctgacttggatccaagcaaaagtgtaacacgtgttgatgatggagtagcttcctttgtgcttaatctcccatctggagtgacggtgctggagtttaatgtgagctgaattctcctgttgtattttctaggacaatgtgtactcttgaccatgtgttttggctagtgtgcagaacagatgcggcagattttacacatgagtccagtgaacagttccataattttgcatccaagacaaattagtcccagagacaatctgctaatccattgaatggtccttgaggaagataaatgtatcaattttttatttgggagttaattgttttatcttacaccgttaagaccatatcagactctagaagcttcagaataggtatagcagtgcacatgagtgttaggaatatcctctcttcccccctcacttttaatcccctgaagggccacaaaagggtcaaaaatatggaagcctcccttttttctaactacagaaaccattctactttagagcccacttaatagtcttctctcgcagcaaatattatttaagttcccaatctcaaataaaatatgagcaataacatagtaacatagttacaaagtaacttagtaacataataacataggccaatgactgcagcatgcatatgctcactgtcatctattgagcacttactaaatgctaggcatcatgctgagagctttatgaagaatacatgaaacaccatttaattagcaagatgagttagaatattatctttgccattgtgtggctcaggaaatggaggcttctaacctctcttttgattaactaattttatccagagttaataagtggtggtactggtatgtgaaccagtgtgtacctgactccagagcatgagctaataacacttctgctgtctgagggtagatattgctgccatgatatcatttcttctccacctcatatttataagcacccatctgtgcctctacttcacaatgaaactgggccagatagtctctgagatgttcgttcatagctcctgtccccaagagttagtgctacctccccactacttcccttctcctacccccatttcctaaatgcttaggcatctctctgtaatcatcccatgcgaggagaagtcccaacttaccatgacatttcaggaagaccaccaataattattcctggagcatctttctctcttcatttcagacttttccgccatagcccataatcccatcattcttgtctgtagtctttgtaaagttgcttgacaccacagctgtataaacactgaagtaatggagggttttttcccctttagcatttgttattgtgaaatttagaaatttataaagcaaggaaaataatttgaaaggtatgttttacagaaagcattacatcacagtatacatgtctttttgaaatttctcttttcaggtcaaaactgatgctccagatcttccagaagaaaatcaggccagggaaggttaccgagcaatagcatactcatctctcagccaaagttacctttatattgattggactgataaccataaggctttgctagtgggagaacatctgaatattattgttacccccaaaagcccatatattgacaaaataactcactataattacttggtaagtacataatgatggatttacatcttattcccccacctggaacattttcctttgcctctagagaggcattagaattatcctttatacttttattcccaaagcactttcaagagcatcatctaacttgaacatcagtttctcaaaaaacctttgaaatagggcatgattttcatgaccatttcacagatgaggaaactgagggacagagaagttaaaagacttatgatggttactcagctgggaagaggaaaattttgatttgagctgaggactctgactcctgttctaataacactttttaccaaagagagcctagttattccaaagcgagaacctgattaaatcatgttgcctctgttctctttcatggccaaagattatatgcctagacccagttcggataagtgaattttattgtcaaaaaatggggaagcaaaatcctctcctgagaattgaatcctatcttgcctgttccaattccgtagctgagcaacatccctattgcatcatttatattaaacagaggtggatcgatgaagcctgttggtgaaaccaagaaaaaaacttacagaaaatattaagagcttcctgacaatcaccaaataaatggaatgaattatttcgacagccaggccaagtacatgctgttggcttttcaacatttttgaggaagaaattgaaaaaacagtaatgaggaccatagataaatattgactgataaagggaaactgtttatggactagataccaaatccatgtatgcagttctggtctctaaggacaatttaagggacctctgagggcattttggcttcacgtgattttttttttttaatcttaaaccttcaatttagaatctaaaccctggctttaaatccccaaataagatgcactccacttattcatctatttttttttaatcggtgaaacaaaaggggttttagtgacagtgtgatgactttgaacagtttttgggttcaaattttagctctctaatttactagttgtgtgattttgaattaaaatcagtatgacttttagtttctgagcctcagtttcttaaatgaggagaataatattcctcttattgatgtattgtgagaatgaaaggagttaaatacatgttaaagttcctggcacatagtaggcccataaacgttaactcactctttcttccttccttccttccttccttccttccttccttccttccttccttccttccttcctttccttccttccttccttctttctttctttcttttctttctttctttccctccctccctcccttctttccttccttccttccttctttctttctttccctccctccctccctcccttctttcttgccttccttccttccttccttccttccttccttccttcctttctttttggtggagtctcactctgtcccccaagctggagtgcagtggcatgatttcgactcactgcaacctctgcctcccaagttcaagcaattctcctgcctcagccttccgagtagctgggattacatatgcccaccacagtgcccggctaatttttttatttttagtagagccagggtttcaccatgttggccaggcaggtctcaaactcctgacctcaggtgatctgcctgccttggcctcccaaacttctgggattacaggtgtgagccaccgtgcccagccaaaattggtatgtctttttttttttttttttttttttttgagacagagtcttgctctgttgcacaggctggagtgcagtggcatgatctcagctcactgcaaacttcacctctcgggctccagtaattctcatgcctcagcctcccgagtaggtgtgattacagtcatgcaccaccatgcctggctaacttttgtatttttagtagagatggtgtttcactatgttggccaggctggtcttgaactcctggcctcaagtgatcggcccacctcggcctcccaaagtgctaggattacaggtgtgagccactgtgcccagcctaactttatttttctttaacataatttctgctccagctccaggctgcatcctaaagcacaggttttgtttttgtttgtttattttttacttattgttgctgctgctgtttatttttagattttatccaagggcaaaattatccactttggcacgagggagaaattttcagatgcatcttatcaaagtataaacattccagtaacacagaacatggttccttcatcccgacttctggtctattacatcgtcacaggagaacagacagcagaattagtgtctgattcagtctggttaaatattgaagaaaaatgtggcaaccagctccaggtaagccacaaattataagtcacaattgaattttcttttcaatgaaggaggctgccaaagttttagctgcttctgaaaagtcttgtctcatacaaatgatcttttcttttctttttcaaatgaacttttaggttcatctgtctcctgatgcagatgcatattctccaggccaaactgtgtctcttaatatggcaactggaatggattcctgggtggcattagcagcagtggacagtgctgtgtatggagtccaaagaggagccaaaaagcccttggaaagagttaagtaatgcatgtctcgctgcagtgttgcatgaagtgtggccaccaggctaggatatggaggaagaactaagggaagactaggcctgcttttctgtaatctactcaacatactcatttttaggaaggtaaaccatcctcctgtcagctcccaaagcacaggtcaatcctcttttgtttttcaaatgtaaatgtaagcactttaagaatatatgatcatggtagcaattacattcatggaggaaaaattactatcagaatactttggaggtttagggtagggtgttgatggcagttatagtagctagtagcagcacaggaaagacctgtataggtaacatttggattttttttaaattctcattgaaatccatagcacagaagaatctcaaaatcattcaattctcataagttcctatttatcttattatgttcagctattattttcgaggcttgaatgtctttgaacaaggaaggaaggactgagaaactgtaaaattaaaaaatactcggagaacgaataagcctgtccaaacaagtcttcagccatttagaacctagggacctccccaccaaaatgcacaaagttgtgcttttaaagcaacttaaaattaatttctatgttaattcagtccttcatgcattcatacctatttatttatttatttggaacattatattgattgcagcattcattctatgtacaaaacactatatatcagtttctaagaaactcctcatcaaagctatttgtttaagacttagttcttgatttaactttgaatagttatgtatttataaatacaaaaggacaaacttagaaacaaagttgggaaattttgtctttgatcatttgaaaaatatcatctgtgtatttcactggtttgtgataaccatgtaacaattagtaccttttagatctttagaggaatgatttatacatctcaatgtgctcaacattttgcctttctggacaggtatttcaattcttagagaagagtgatctgggctgtggggcaggtggtggcctcaacaatgccaatgtgttccacctagctggacttaccttcctcactaatgcaaatgcagatgactcccaagaaaatggtaaaatgctcagcatgtttattactgaaaatcccattgatcatttgccccccagatctcatttttatccttcttcccaaatattctgtaccctgatcttagaatgccaagactacataactcacctgtataaaatgtttcactggccttcaagataaagtacaaattctttagtgtagtactcaaaaccttccatgatcttcgccctggctctctccaactagctcttaccctgctgtgccttacgttatgtttaagctctacagaaccaagtggagttcttgagtggcattatgctattttgcacctttgggcctttatttattggaattggtttccccttcattagcctggagaagcaatgtaagaatcatcgcctctacgagacctcttccccacatagaatttataattccctcctcctttaatagggaggctattgcagggactagatctatttacaagttatagaacagcattgtgtcattgtgcattcttacatgtagttgtaagtcctgctcacctactgcatcaggagctctttaaggatagtaaccataccttaatcatcttctttctatggttttaaaattgttcataattatacttgatactgtggtattcatagttatatttgcaataatatagcacaaagagcaaataataaaaatagcatacccaacaaaagcatcactcactctaaatgcttaggtatttctctggaatcagtggatcagagaggctgcaggattcaaaaccaaattcagataaaataagtcaaaagatatgacactagatcatgaactccactaagataaaacaagtcatattaagaagtatggtgcacagttcctaatccaaagcagcccctcaatatttgttaaggaatgacttgtgaaggctctaaatacttaaatagtttcatggaatttttttttgagattttatctcctttttaatccttcttctttatctttttttaaaaaaaccagatgaaccttgtaaagaaattctcaggccaagaagaacgctgcaaaagaagatagaagaaataggtactgtaagattcatgtgattgtaaaaaggttatggtcatatcattcaaaaactggacaaaattaaatgttatataaattcccctaattgaaataaaatgaatgaaaagaaagatatgtatggaggtctagcttatctctctcagaaagattaatccaaataaagtctagtagttcatttgccatagccttaatctaaggaaataggtctttattacttcaagctctaaaatccaaaatattagcttttatttgtcataaatattttctctctgataacttcatctggcaattaaaatcatatccttccattttattctgacaaaatccatgatttgactattttggggatatacctagaagtctattacttctatttcatatatttaactgttagtagcattgttctttggaaaatacatcttgtgagaattattttaaaataattatttaaatggttatgataattcgtcatgttactgtagaaagaatatcaaactgggagtcagcaaattgagttcaactaatatcatgcctatggtaatataatagtttcttccatttgtatatgagttattttaattctaacctttattctaagttctaatgatatgaaaagagagacattgactaatctgagcacttacaatgaaggataatgctactaggtgaagtccacaaaccatgttatataagaagtttttgaaaaataggatattcagcttgaagaaggaaatatttgtatagtgatgatagccatcttcaaatatttgaaggcttcttggatatttaacttattttcttaaaaaacattttctattctttttctatatttttctgcatattttcagcagaacccaaagttccagtttcaagagttagtatttagcttaattgcaggaaaccctttaaccatttagtgtgagctggaatggaccatttggtaaggtcacattctccccattcttagaatagttccaaggggagtctggacagtcaactagccataactattgtgggtagggggatcatatagcaacagaaaccaggtatcccttgagattccttctaagcctgagatgttatcactctgcgtcatcaagagcacttgcattattaccatttcagctgctaaatataaacattcagtagtgaagaaatgttgttacgatggagcctgcgttaataatgatgaaacctgtgagcagcgagctgcacggattagtttagggccaagatgcatcaaagctttcactgaatgttgtgtcgtcgcaagccagctccgtgctaatatctctcataaagacatgcaattgggaaggctacgtaagtatgacattttctatcagaattctgctcaatatggggaattttgtgtaattttatgctgctaagaaaggcagttttcatgatctatttagaattgaaagtagaaaagataacttgtaaatgtccataagaaaaaaaaatccttcatttttgggcatccgaagaggtacagtacagagcagagtacactaggccagagttaagacctggcataaccttaaagccaagtcatcccataaacttgaatgattatttatcctctctgagcctcatgcaaggagcttcgaccagatcctctccaatatgcctgtgagttctacaagtctacgcttttgtgatattacaaccattaaaaattctgtctatatctacattgatgaaataaagcagaatatttctaaatctagcctaaggttaagtgtacttatataaaagctgatgtcttatttcagtttcaaccacaatacatgtttccagaatttatagaactctcattaacatgttttcagaacttttaggactttatatatagtctttttttttttttttttcagtaggaatctggctctgtcacccaggctggagtgcagtggtgcaatcttggcttactgcaacctctgcctctgggttcaagcgattctcctgcctcagcctcctgagtaactgggattaaaggcgcctgccaccacacctggttaatttttgtatttttagtagggacagggtttcaccatattggccaggctggtcttgaactcctgacctcaggtgatccgtccacctcggcctcccaaagtgctgagattacaggcgtgagccactgtgcccagcctatgtatagtctttaacaaaacaagcaaaagcaaaatgacagcttctgttttatacttatgtgtgctgcgtaatgacattttcatcaatgatggaccacatgtgcaacggtgatcctataggattataataccgtattttttctgtacctttcctgtgtttagatatgcttagatacacaaatacttatcattgcattacagttgtctgcagtattctgttcagtaacatgctgtacaggtttgtagcctaggagaaataggctatactatatagtctagatctgtagtaagttataccatctagattagtgtaagtacgctccatgatggttacacaacaaaatcatctaacaacatatttctcagaacatagccctattgttaagcaatatctaataaccataattttggtaaatggccacaaaatttatgtttgtagaaatatattcattgagatgtacagtgtctaagattcagattgttttccaatatttgttttgctttgtttgtttgtttgtttgagagacagagttttgtttttgttgcccaggctggagtgcaatggcgcagtctcagctcactgcaacctccgcctcccgggttcaagcaattctcctgcctcagcctcccaagtagctgggattacatgcacctgccaccatgcctggctaataatatttgcttattataagcagaattttaataaacagtctagtccatatgttgtttttctttttggagggaggatttggcttttttttctcttaattttttttaatttttaaatttatgtgggtaaatagtatttacggggtacacgagatactttgatacaggaatgcaataagtaacaatcatatcatggaaaatggggtatctatcccctgaggtatttctcctttgttttataaacaatccaattatactcttttagttatttttaaatgtacaattaaattattattgactgtagtcaccctgttgtgctgtcaagtactaagtcttattcattctttctattttttgtacccataaaccatccccacatccccctcatcctcctactacccttcccagccttctactctatatctccataagttaaattgttttgatttttagcacccacaaataagtgagaacatgtgaattttgtctttctgtgcctgacttatttcacttaacataatgacctccagttccatccatattgttgcaaatgacaggatctcattcttttcatggctgagtagtactccattgtgtatatgcaccacattttctttatccatttatctgttgatggacatttaggttgcttccaaatcctgactatttttaacagtgcagcaacaaacatgggcgtgcagatatctcttcgatgtactgattttctttcttttgggtatatacccagcagtgggattgccagatcatatggtagctctattctttgttttttaaggaacctccaaactgttctccatagtgtatagtaatttacattccccactaacagtgtacaagagttcccttttctccacatcccctccagcatttgttattgcctgtcttttgaataaaagccattttaactgagatgagatgatatttcattgtagctttgattgcatttctctggtgattactgatgttgagcaccttttcacatgcttttttgccatttgtatgtcttctttagagaaatgtctattcaaatcttttgcccatttttaagtgggattattacattttttcctgtagagttgtttgaactccttatatattcttgttattaatctcttgtcagatgggtagctgcaagtattttctcccattctgtaggttgtctgcttactttattgattcctttgctgtacagaagctctttaacttgatgtgatcccatttgtccattttggctttggttgtctgtgtagtggggtattactcaagaaacttttgcccagaccaatgtcctagagagttttcccagtgttttcctatagcagttttatagttagaggtcttagagttaaatctttaatcaatttttatttgagttttgtatatggcaagagataagggtcacgtttcattcttctgcatgaatgggataaccagttttcccagcaccattaattgaagagactgtccttcctccaatgtatgttcttggcacctttgtcaaaaatgcgttcactataggtgtgtggatttgtctgggttttctattctgttccataggtctatatgtctgcttttatgccactaccatgctgttttgaattatactatagtataatttgaagtcaggtaatgtgattcctccagtttttttctttttgctcgggattgctttggctattctggtcttttgtagttccatatgaattttaggattttttttctatttctgcaaagaatgttattggtgttttcatagagattgcattgaatcagtagattgctttgggtattaaggcgttttaacaatattgattcttccaatccatgaatatggaataactttccatttttttgagtgtcctcttgaatttctttcattggtgttttatagttttcattgtagaaatcttttacttctttggttaatttaattcctaggtatttaattttatttgtggctattgtaaatggtattactttttaaatttctttttcacattgttcattattgacatatagaaatgctactgatttttgtatgttgattttatatcctgcaactttattgaattcatttagcagttctaatagttttttggtggagtcctcaggtttttccaaatatgtgatcatatcatttgcatacaaggataacttgacttcttgctttctagtttggatgacctttatttccttctcttgtctaattgttctggctaggacttccagtgcactaggacttgcctagaaattgcagtccttgtggcctagactgcccctcaagttaacctagggccctagagcactccagcccatggtggggaggcttgctggaactcaagctccaaccactgggatgagcgatgcccctctggctagggccagtccaaatgctccctccatgggcagacaccagctgagtacagcctggttctgctttccaccgtgacagtgcaacactgagttcaatgcaaagccacagaatgactgcactctccctctcccaacacagagattctccatgctgcacagtcactgctaggggatgtgggaggagtggcattggtgcttcaagactatctttcctgccctcttcaatgtctctttcagtgatgtaaagtcaaaaccaggtactgtgattgctcacctgattttcggttctcttgatggtgctttttgtgtgtagttagttgttaaaatttagtgtaccaacaggaaagacaaatggtgtaggcttctattcagccatcttgctctcccctctcatatattttttcgtttttcaatttttcaactataatcatctggcttggcttcagctggatagaagtctctctctgcagccccctccttcctggaactctccctcattccagacaagttggccttgcaaaactcccatcagtgttgccacaagtcttcaaaatcatcaggctctgcttgtattcctctccctgccctagtctgtaaactgcctctaggcagtaagctggggcaattttaggtttcacctaattgtttcctttctcttagagatcacagtcttgcttatgctctaatgtctgaaaactgttattttgcatatcatgttttgttttctattaaggcatcttatatgaaaacagaagttcagtccatttttattaaagtaaatataaacaaattaccaagttaaagaaggcagagaaccatataaagcctccttttttctaatataaacacaattattacaattatatatataagtgcaaataactttatagactgatcgatatcttgtataatctcaggaatactaaacatttagcaatttaagaaaaaaatcattaaagatatttaatgctttgttttgccaatgctattagtggaaaaatcctaaggcctttatagtttgtttgtttgtttgtttgtttgtttgtgacagagtctctctctgttacccaggctggagtgcagtggtgcaatctcggctcactgcaacctctacctcccaggttcaagtgattcttgtgcctcagcctcctgagtagctgggactatagacacccgccaccatgcccagctaatttttgtgtttttagtagagacggggtttcaacatgttggccaggctgatctcgaattcctgacctcaggtgatctgcccacctcggcctcccaaagtgctgggattacaggcatgagccactgcaccctgcctataattctattttggaagcattaaacaaaatgttttatttacctttcagaaaatgcttaagttacagattaatggccatattttaaaattcacctataagtagaatttatattgtttttccataattgaatatgatttttttgtccagacatgaagaccctgttaccagtaagcaagccagaaattcggagttattttccagaaagctggttgtgggaagttcatcttgttcccagaaggtattatacttctttcatgtttccttgaaagaaatgtggataatgcaagtattatggccaaaaatctagaaactacccatttcccaatagcttgcataggagttaagatgatcctgcaatttgatcaaattttgttttgttttgctttgcttttttaaatttttatttttttaatatacatcgtactggtgattggctccaggtcagaatgaagaagggtgctattccatttaattttatttgacttcattatgcatttactacacacaactatgtgcgatacactatattaagccactatttttatcctaaaatatctgtactataaaacaaacattaataaacaggaagaaaagttttctttttaaagttttctattcaacacattttaaggaaacacttcctctataccactgaaaacagtgatgggctgagtcctcgagccatactcttcttagatgggcttaaagcactggttttccaatgagaaggcaaggaatgagttcaaaggcctgcagttgtctcctcacgcatctccttatttctacccttgtcttctctaatccttcttccacacaattgtccatttcatctgacattacccattagctagcatgtcctctagtaaaccttctggccactgctccccacactaccagtgattggattaattgcaccctcaattaaccctgttgtgtgtatcatattgtattataatgacttgtttactttcctgtcttccacattaaaatgtaaatacctcaaaggcatgaactaaattcagattactgttttatatccaggacttggcctaggatactgaaaataaatgtgttgaacgaaagcacactgcctctgaactcttataatgccttattggtacaattattacagtgcagtgtaatttatttacttaactatttcttccactagattgtaaactgcctgagagcaggactgtatcttatcagtgctgtttactcagtactcagcactatacctgatacaaagttggtagacaatagctgtaaataaatatacaagcttaatcataatcagcagtttttagttatgtcaactttgttttgagcagtgctaacatgcatcactttgcttccctattttagaatatactcacaacaaacatctttttctttgtttgtgtgcttggattttgcaatgtttcaaaggcattcttctgaacttgaattctcatcatagaggtgcaatgtctaaaaacatgcaatatataagagagttactgaatatatttttcttgatgaggttttccttaatgatgtgatttcatctcgtgaatttttttctttctctaaagtagtttgaagcaaaaattctgttaatggatgtctctgttaagttgggttaatcaatattccactgtatttgaatatcaacattttaacttccagaaaacagttgcagtttgccctacctgattctctaaccacctgggaaattcaaggcgttggcatttcaaacactggtaagcaggtttaagtgatatatgcatttaaatagtgatttgattagcaagatgtaattctttgttagtatctatttagtttacccaggacttaaatggtagcaatttttaaaaaatattcttttttttatgtattaccaaaagacttggatatacccacatctttgaacatattgatttctcctttcactcctctcttttttttctttttcctttttttgtaaatgaagaaggggtctcgctatgttgtccaagctggtctcaaactcctagtttcaagcaaccttcccacctccaccttccaaagtgctgggattacagcttgagccactgcacccagcctcaagtctttattttccttcacttttctcactgactgggagcttgtgtagagttagaaacaaataaatgaactctcttgggctgatctttatgatgattaagtgcagatgctttccaaatagcttcaggaatggttttgtttgtttgtttgctacttttgttttaaaatcttggtttccacaatcaaaattttatactcattaaacatggagccaataatgaatatctaaaaagatttggtgtgttagttgataaacattctcatgccttaaatagaattaactatttgttgaataaatgaagttttttgttaatactaattattattgaaattaagatcaatgaatagaaaattcaaggacatgagttgagagttcagagaaaaacatgatctaatattattttttccttgaagtaaagcaaatgtgagaaattttaataccaataaaacattataggaatttcctaatatgattctactttgcttccactttgggctgaaggtatatgtgttgctgatactgtcaaggcaaaggtgttcaaagatgtcttcctggaaatgaatataccatattctgttgtacgaggagaacagatccaattgaaaggaactgtttacaactataggacttctgggatgcaggtaagtaggtgttaatatttatgggataaaggaaacattctctggttttctgagaattctattagtggaattaccatacacaaaaaagtagaagttcaactcagttcagcaatagaaaccaaacacttaaaatgagcattgtactatatgtgtagggatgtgaattaaagggatgaaggaaggaggaaggacaagtaggtattcatgtaacttcaattgaaagaataaattgcataagataatccatgtgctgtggaagtccagagaagggtgaattcatctttagttcctttatttgcctatactcagagttccttgatttccttgattctaacaaccctttcctccattttagccattcatactcatcttcactttatagatcttatcatcctctctgaaatcttgatttcagacattcacatctcaccatccagtgacaacctccttcctgtcctcctaactcattaaccagattacttccatagctctgggtcagtagcatcactgaaaccttcagtccattgactcaatcccttttattgtcctttacttccctgctctttttactttactccttgttcagattagaattcaccagccatcattaaaaccacactgactaaaattatgccaactccctggatcctatctcactccaggacacaattccaaccatgattggacccaccatttatcttctctttgccagcacacccctaaagagaattatataataggctgactgatttgatttgaaaatcacagtcacaaaactttgcatgagaattcaatgtgttccaaaattctagctatatttttttaaaacactaactttattcttagagattagaatttcagtggtttcctaaaattttgcttacataccctcttgttttggaaaaactatgtatccctctgacacttttttttttaagacggagtctcgctctgccctctgacacattttaaaattggcatctaaaatttttatcatacattttttaaaagatggcaatctattacttttaaaatatttaaatattggtatcttaaaataaaactgttttatcaaacttatgtatagcagactccaaataccatagcaatcaattttttaaatgctcaaataagcctttttttttcaagatggggtcttgttctattgcccaggctggagtgcagtggtgcgatctccgctcactgcaaactcctcctcccctgttcaagcaattctcatgactcagcctcctgagtagctaggattacaggtacacgccaccatgcttggctaatttttgtatttttagtagagacaggtttcgccatgttggccaggctggtctcgaactcctgacctcaagtgacccacctgcctcagcttcccaaagtactgggattacaagcatgaggaactgctcctgggctcgaataagctcttagcaacagattacatatcattccttttcctcaatgaattcatatttccattttactcccctaatgttacatattttatgcatgaatttttttctgttgatcaccttattatactttaatgaacaaaaatatgcacatacattgaaaatgaaatatcttaaaatttcatgattgtaaaattccaagtatcaaatgatatgtggatttaggtatcattacaaatattattattagtatactattgataaaataacatatttctaaagttattaaatatagaaataaaattttatttaaaaattctcttctcggccaggagcggtggctcaggcctataatctcagcactttgggaggccgaggcgggtggatcacgaggtcaggcgatcgacaccatcctggcaaacacggtgaaaccccatctctactaaaaatacaaaaaagttagccaggcttggtggcaggcgcctgtagtcccagctactcgggagacagaggccggagaatggcgtgaacccgggaggcggagcttgcagtgagccgagattgcgccactacactccagcctgggcgacagagcgacactccgtctcaaaaaaaaaattatcttctcattagataaatgaaatttttctctcaattggcttaatagttatggataaatgttatttattgttagaaatgagagagagtttggcataaattctattcttatttttcatttttatagaggtaggcattgctgttcaacccaattttatcaggaaggttgataaaataaaaatattgtcaattttattacccctttatcaatatattttaatcttatatcttggagcttcacatttagcttattcaatttatgtaatatgtttgtcatataatctaactggaaaaatcagtcctcattgataaaatgatcagcgaaaatcagacttactctttgtcatagaaatgccaatttcatttttcaatccaaatcatgttaagaaatgtcactctttttttcacaattttaattttcagtaaaaatgaacttttccatataaacttgtttcatcaggtaacactaaatatcagagaatgcacacacaaattttacttggccacaggatgtaaatggggaataaacttaagtaatcagaatttaccatactgatggtattatcttttttttttttctttttttgagacagagtcttgctctgtcacccaggctggagtgcaatggcacaatctcggttcactgcagcctccgcttcccaagttcaagtgattctcctgcctcagcctcctgagtagctgggattacaagcatgtgccagctcgcctggctaatttttgcatttttagtagagacagggtttcaccatgtggtccaggctggtctcgaactcctgaccttgtgatctgcccaccttggcctcccaaagtgctgaaattacaggcatgagccactgttcccggccagtattatcttatttttacagaaataaaatcaaaatgttactcatttctcttccttagaatttactcacagggtttgcataaatcctatgaatcatgccaccatcttcagccctgtggaattgccctccctcatttggctccatccccaccaccctaaatacaacgtgaagagttggagaaggaccttgattaagaagctgtaaagttgcctttacattatttcttttaaacccactagcttttctgcagacagaatgcttcatgaatttaagataatcataactcagatagagataccaaaggccatttctccatcaggttcctgtagtggttttcatgtctcaaaatcctgattcaagatgggcttgaggcttggaaactgagatactaagacagtcagaccatctcatcaaaacagactcagcataattttataactcacactgatcttggctaccaaaggattttggtagatgattaaggaggtgtcactcttaaaccatgtaaattgtaatttgagatagacacataaataggtggccataacagatgggtaaggcacagaggccacagccaaactctgctcaactgtaggattgagatcagcaagggctcctctgctcacctagtcttagacatataaaatcggcttgtgtaggtatgtgtgtatatatatatatatatatatatatacacacacatatatatatacatatatacatatatacgtatatatacatatatatacatatatacatatatatacatatacatatatacatatatatatatacgtatatatacatatatacgtatatgtacatatctacatatatacatatatgtacatatctatacatatatacatacatatatatatatatacacacactgcctcagcaatttgtgtttccaccaataatattatcagagacatcctttcatatcagtatatacagatttacttcattactttaatggctgcacagtaattcacatggtgggtatactataatttattgaaccatgtttctattaaagacatttgggttgtttacaggttttcactattataactgattttgcaaagtctgcatttatgcatacatatcttcctacatgtatatttctgtaggatagatgttttgtcttggagtgaactaactgggctaaagggcatggacattttaccttctgataataaatattgccataattatcttccaaaaggattccatcaattgacattcttaccaagtgtatgcaggtagccttgatccctcacattcttataatttgggggaataaacattttttcttttattcatacaatgaacacttatacagaaattgaaatgaatggactagataactacatgcatcattttgattaaagctcaaaaatgtaacattgctgaaaaaagcaaattgcagaataatatgtatacacaatgaatacaactacataatatttaaaaacatgaaagaccgcgctatatattgtttgttaatacacataaaatttttgccaagttgacagacacaagtgatatgtcactgatgtttctatttcactaccctgattactagcaatgttgaacctcatttcatttgtctgtggccatttgtatttcttctttcatgtattctatgatatcctatatactactttaatatcctttcttttgctttccattgagttccttttttctggggtaagttacctagcttcttcttgcttagtttcctcatctgacaaatgggatgataatagtatctatttcatagttgaagattaaatgagctaattcatgtaaatatagtacttggcccatagtgagtactcaacaaatgtacttattattgtttacaggagcactttgtatgttagagctataaattctttattgattataaatgttgctggtatttaatctgctacttgtctttaactttgttattagtgtttttaatttgtatgttataaaatctgtagatcttttcctttatgtcatttgagttttgtgtttttggaaatcttttctcactgcaagttttaaaaacgtttttctacaaaatactgcatgttctcacttataagtgggagctaaacattgagtatatatggacacaaagaagggaacagcagacaccagggcctgcttgagggtggagggtgagagaagggtaaagatcaaaaaatgacctattaggtactatgcttattacctgaatgatgaaagaatctgcacaccaaacctctgcgacacgccatttacctatacaacagacctgcacatgtgccccgaacctaaaataaaatgtttttctaaagaactgttttttctatattttctatagtacttttatagttttttgtgagcatttagatttttttatctgaaataaggatctaatcccaaatagccagatgatccagcagtatttgttaaggaattcatgcttttccaactgatttaaaatgtcatcttgcccccatatatattgaatttccatatatgtggatctatttatagattctctcctctgttttgtttacatcagtatcacactgatttaaagtaccatagatttgtggttatattgtataactattaggcaagtactctctggtattcttatttttcaaacgtttttgatgttgttattcttacacatttactctgccagataaactttggaattagtttgttgaattctccttttaaaattataatagggttttcatattgtcctgaatttatgaattaatataagggaaattgacttgccatattgaatcttttacatctctttatccttttgctttatgaactaaatcaagggtcagcaatttatggaccatgggccaaatctagcctgccatctcttttgtatgtcctttgcaataacacaattatatataacttgacagcattttttttttttttgagacagagtctcgccctgtcgcccaggctggagtgcaatgggaagatctcgggtcactgcaagctccgcctgccaggttcaagcgattctcctgcctcagcctcccaagtagctgggattacaggcacacaccaccatgcccagccaacttgacagcattttaaagtgtcatgcatatcactatactgccatattttatttaatctttaaattttcagtgcatttccatcatatcaaaataagaaacaagtacatctgtgatattttgggcttagttcctgttaattacctttcctcctgagtgtgggttacactttcctatttctttttatctagtaattttggattgaatcttctactttattaataaaaatattataaagactctggattctattacattcctctgaagatttttcgtgtgtgtgtgtgtgttagcaggcagttggctggattcagttccagactctgaaatctcagttcagtatttttagccttagctggatgctagaaatctgtgctgtgcataggtcaagggtcagccaggtttgagcaaggattatacacagaacttggagttccttcactattcagctgtggtaactattccctactttgtcctctagttcctaaaccagtatgatgtcaggttctactggggttttagccactccaaggcaccaatgggacctgccctcagggtaaagctataaaaagcgggacacttattcagtgtcattcccttctcccaagtgtcactttccctcccactctctagtatctgcaggtagtttgttttaatatgtatcttgtctagagtttgtggttatttttacagaaaggttgcccaatataagctatttggctattactgaaaccagaaccacttttttttttatattttctatcagtttcaaaagttccttttagtctcaatttactaagagtttttgtaatgcaattatgctgaattgtattaaatgactcttctatatctatccttccccaccctcccctgctgttctaaggaaatcattggccgcaggtgatccaatagtcttttgctctggcttctcccaccctggtggttgtctcccaagaagatagttaagaaggaaaaggaactttctgttttcaagaaattcctcaaaattagtggttgaatagctggtgctctcttttgtttacctgcttgacttattctggattttatggatttattattttgggtatagttctcaattctatcagttcaccagaatttggagggaagatgaaaaatgtttactatttgagccagaagtcagtgggcactattattattcccattacaaagatgagaaaatggaggattagagagttcatgcaaccagtttccatcaccagttaataagaggaatgccaaaaattgaatccaggtctttctggagccagagtttggttgtaaaatggggtacaaatgggaagttgataaaattagaaaagtaagctggggacataatgggcagggccttgaatgccgatatagggaattttcagtctttgatgaaacccatcatttactgaataccagaggctgagctaaaagatacaaaaatgaataagatgaaaatgaaaaagtacctgagcctaaggctcccactatctgaaacacaaacatgtaaagagacagggtaataagtgctatcacaacagcatgagctctgtacccaatttagtacgtaacagtctaagaaaggtaagatgtttctgagacagtgttgacttttctagacatctgtttgcattgctaaactctacggcaacttgtgtgtctatgttaggaaatctgaaatgaactttcttctgtgccttagaatctaagggattattttaacattgttaaagtggagagtttgtgtccagacaagcataatcaaggtcaacttttttagagataaagtatttcgagtctgggcacggattacagcatcatgcctgtaattccagtactttgggaggctgaggtgggcggatcacctgagatcaggagttcgagatcagcctggccaacatggagaaaccgtgcctctactaaaaatacaaaaattagctgggtgtggtggcgcatgcctgtaatcccagctactcaggaggctgaggcaggagaattgcttgaatccgggaggcggaggttgcagtgagctgagatcatgccgctgcactccagcctgggcgacatagcaagactctgtctcaaaaaaaaaaaatgtattttgatataattcttcacttgtatttcagttctgtgttaaaatgtctgctgtggagggaatctgcacttcggaaagcccagtcattgatcatcagggcacaaagtcctccaaatgtgtgcgccagaaagtagagggctcctccagtcacttggtgacattcactgtgcttcctctggaaattggccttcacaacatcaatttttcactggagacttggtttggaaaagaaatcttagtaaaaacattacgagtggtggtaagaaaaacatgcttcaataacttatgcttaaattattgcaaaagagagacacagaaaggggggggagagaaacaatagtgtaaatttaacgaaacattaagcattaaggaaactggatggaggttattccagattttttttgtactattcttgcaatttttctgtaagtctgaaatcgtgcttaaaaatttttaataaaacaatatttgtttcgtagaaaatataaaatactgaaaaacgacagataaataaaaatcatcaataattcccatacccagagatatctaattttaacaattggtacacgtctttttttggtatacaggtacaattggtacacaggcttttttttccccttaatacattcagaaaatgtgtcttgaaatctatgtgccagacattatgcaaggaactggagataaaacaataaataagacatggcccttgaatttaaagaacttgcagtctagaaaactttccattgtataaacaaataaacagtcccaaaaaagaagaaaagtataatttgttaagtacaatttacccacagtctgttaattgtattcacgctattaacattaatatttttatgtaattttaatatttttatataattttaatattttatataagtatgatttaccaattaaaaataatagtacttttaaaggactaagattcttgctaagggtcatatggccaattaatgacagactggatttcctggctcttcactctctgttttcagctatgaaattcacttcagtaaacatgtaccgacttattttgtgcaaagcacattcccatgcatccttgcactgtggttccatgcagtctctggagcgaggctgctgggccttgaatcttggctccatcacctcctagcagtgtgacagtgttacttgatttccatgtgtgtcagtctcctcatctgtcgaatgggagtaataacagcaccaacctcatagaggtttttagaggttaaatgagttaatacatataaagcacttagaacaattatctggcttataaataacttctttttaagcatttgctctggtcaatatgcaaatagccataaaatcttattgctgcttatatccatgtaagtatttatacatagtttgccttttccaagaaaaataattttttagtttgaaaagtggtccagaaaagttgatccagggaattcaggttatataaacttatgtttttaactgaatgttttctgcctttattttagccagaaggtgtcaaaagggaaagctattctggtgttactttggatcctaggggtatttatggtaggcaaaatgattttttattttatatgttatcttttgctttagaagttaaagtgtgtatgtaacttaaaacactatttttcagaaagtgaattgtctaaaatcagtagtatccacttctggccaggcacagtggctcatgcctgtaatcctagcactttgggaggccgaggtgggtggatcatttgaggtcaggagttcgagaccagcctggccaacatagtgaaaccctacctctactaaaaatacaaaaattagctgggcatggtggtgggcacccatagtcccagctatttgggaagctgaggcaggagaatcgcttgaacctgagaggtggaggttacagtgagctgagatcgtgccactgcactccagcctgggcgacagagcaagactgtgtcaaaaaaaaaaaaaaaaaagtatccacttcttagatcactatctttcttgatagcattatagtacaactactataatctgaatgactgagacacaacaataataattccattaattttgaatgcaaggccttgaaatagtaacaattgcatgacttccctcatatattattcattgtctatccatcacaataataatttataatatattattattgagccaacagtccaaagaacacctaagaaaaagtcatttacataattaacatgcattatttgaaaacataataatgctaattaatcactaaacaaacccattcctcattgctcctgcttccctacttttccttcaattgagatattccaaatcttctcaaagctagaattttgcaaacatttgagtacttaatcaaggcctaaatacatatacatgtatttatgaaatttaggatgtggccagttaaccattctcttttcaactaaagaagacagattactgcagttcttattaaatgcttacaacttatcttaacgttgtatcaataatttttgttttatttcaatgatataacaatggggaaaaaatttacttacagatcatgatcactatcatcagtgtcatttcctctgggaaagcaaagaattaataccctttacactttaattcatctgagtatcatgaactgaggagtgttatttcagtagagcaataaaaagtaaaatccatctatgtacatgcgtccacatgcttacttgtttctccaattttttcttcacacagacctcctccttgcctgctcattgtgaatgatctatgggtagagatattacaagtttcaagggttttagcctcatgcaattatatcaagcctcaaaagccactgtgtccttggcttctctttcttttttttttttttttcaccacagatgcttcttctgctgacattattgcaaacaattttccagagcagtcttgccttactcatcctaggtgtgaacatcaaggccacaggataggaacaatcttttatctgggaataaatctctgtagagaaaatctgggttaaaacaaaaatctgtgcctctttccaatcttctcatatgacttttttcccttaacattttaggcaacttgggtttaggcagctttcctgatttctgcagagctaaagagggaaaagataaaaattctgttcagcttatttcagatattttattaaatacttctaatatttattattttttttttgtggggtggggggacagggtctcactctgttgcccaggctggagtgcagtggcgccatgtcagctcactgcaacctccacctcctgatttcaagcgattctcctgcctcagcctctggaatagctgggattacaagcactcaccaccatgcctggccaatttttatatttttagtagagacggggttttaccatgttggcaaggctggtctggaactccttacctcaagtgacccaccagccttggactcccaaaatgctgggactacaggcgtgagccactgtgcccggcctatttctgatatttatatattgaaatcgctatacaactatgatactttacagggttcagttaaaaaaaaatgctaaaaagtgtttggaaaaataaatggactataatgttaaaggaaatctgaaaaaatatatcaatgagggagaacaaacagtatatagtaattaaaattgtgtgacaccagcttaaaaaaagactaaacacagagactcaatgcttaagactagctctagtctttagtttctgctttctgtccctgataagcccttttctcccaactcgtctcatatctcaaatgcagagtgttaagtttctcactccctcatttcctgacacaccatcctcattggtttaggcaggcccctctcgttttattttttccttcatcccggaccccattcccattccccttcctccaagtgtacccactcaaatgtgtttgctgtatacttttgaatagaaaggtaatgttgttttgtatgtatgtacctctttaatctatgtatatgtaacattgtgctatagatcctattctgtcttaagttgttacactcaaggcttagttttaaagaaatatctcggccaggcgcggtggctcacgcctgtaatcccagcactttgggaggctgaggcgggcggatcacgaggtcaggagatcgagaccatcctggctaaaacggtgaaaccccgtctctactaaaaatacaaaaaattagccaggcgtggtggtgggcacctgtagtcccagctactcgggaggctgaggcaggagaagggcgtgaacccgggaggcggagcttgcagtgagccaagatcacgccactgcactccagcctgggcgacagagcgagactccgtctcaaaaatatatatatatataactctattgttataggtatacttaattcatttttcttacatagaatttcagagcatgttccctcaccattttatccatcactgtatatacaatatatttcccttgaaaaatccatgttagcatttacctggaccatatatccaggagctgggtcaaaggatatatacatatttaatgccatttagtcctgtcatattgcccttcagaatggttatacttccattagcagtgcacgagggttctcgtctctccacaacctcaccaacacttgcctctctaaaatgtggcatttttaatgggtataaagcactatctcattattgttttaatttggattcttctggttactaatgattttaagcatttcttcatatacttgtccatttgggtttcccatctgtcaattgcctattcatatcttttgcacgtttttaaattttctatttgggttatccttttaaaatttcttcttgattttgtctctgatgtacctctttgagcaacaacaagccttcatgggtttgaaaaggaattatttattctgatgtagtcaaatccatcataatttcatcttatggttatatatttttgaggtaatctttaagaggtctttctctactcttagttcacaaagacattgctggatattttattctgttaattttatagatttgaatttaaaatgttttaatctgtctggaacctgcctttttatgtgatgtcttgatgagtcttttaccgtgatcactgatgaggaataaaattaacttctcttagttttaactttctctttaccttttccacctggtagtagagttgccaatggaattgaaatagtcaagagcaggtttcaatggagaaaatggtgaaggagcaaatctagataatctcaaggctatctgtaataagtatcatatattgagcatgaattgtatgccaggctctttgtctatattatttttatcccacaaaaatcctttgaggaaaatgttgttatctccatttaactgatgaacaaattgaggctaagaaaggttgtatcttgcccagcgtcacatatatactaagctctttttgaacttcatgctctttcactcaaagtgcaaacctcttaaatgtcttctgaattttattttgatatatcctctgcatttatcaaggattaatgaagaaagaagttttatgaggaatgttcctgcatttttaggaaagccatgtggcttgtccattaaattgcaaaatgtgactcatttttctttagcatcttccatatgccagggtctgtgctaagtgccaggactacagctggaatgagaaatgattcctgcccccagagtgctttcttagcaggacaatgggaggtggattctctttgtggtgactagtgtgggctctgcagcaaaacttctggagttcagattgcagctccacttgtattgtttctgggaccttgaacacgttactttctaagcctcaatttcctcatctataaaattaaactaatgaaaatagacctaacatagaggactgttgtgagaatccaatgcaataattcatttaaagaacttagtagcatgcttggtactctatcagtagaatgatcaatgttacctttttttggacataaaccagtgatcacagtagaaaaattatctgataccagtatgctaaaactctgttgttttgcccatagattaaaaagtatcaaaactagactgggaagggaaggtggaaagaatttcagatcatacttccctgtggagctaatgttcaatatatagttgattaagaaattacatgttagttattcttagctttcagttccaggaacaattttctgtctttgggcaagctggcatgctatattttgctggtgaataagatttatataacctatttatttcacatcttataatgaccaggaagcttacagccaaatttaatgctttatttaataagattatacaagcctagggtttgattaaagtccttgatgatttttaactttcttttaaaattttaatagtctaattataagtcttttattttgaaatattctttggaagtagatacattataaataatctgcaaacagtcttcccctggaaactctgtataaatccaaattttctaaattacaggtaccattagcagacgaaaggagttcccatacaggatacccttagatttggtccccaaaacagaaatcaaaaggattttgagtgtaaaaggtaaattaacaaatgccatttttatttctcatttcacttggtgcttcaaacaaaaatcaaatatcctcatgattattctgtttctccacttccgtgttcagtagcacacacaaatctacctttaggagtgctccacccctacccacccccactttcaaacctttaatcacttttcccactatcttcttccaacggcctgatttacatggagatgcattctcctccaatggaaggtagggactgtcattggctcaaagatgtctctaaaatgggggtccagttgcttctagacttaaagaactttccatggtcttagtggccagtcccgctccagagaaggcctatggcctgcacatggcctagcgagaacagcactgctctgctgaagtactggtcccagaagggttgtcttagtccatttatgctgccataacaaaataacaaaatttataaataatacaaatttatttctcacagttctggaggctgggaagtccaagatcaaggcatcaagagattgggtgtttggcaagggctgctctctgtttccatgaggatatatgttgctgtatcctcctgtggcagaaagtggaaaggcaaaagggcaaaaaggggtgaagaacttcctcttacctcgtctataagattattaatcccactcattagggtggagccatcataacctaatcacctctcaaaaagccccaccttctaatactatcaccttggtgattaggcttcagtgtatgaattttggagagacatatacattcaaaccatagcagggattctcctcccctcgcatacatttgcagaagtgatatttgcacaagtgactaggttttccttagtctccaggctttacaattcaataacatattaccgaatgatagaatgtcctgactacattttatctcagataaaaccctagaatcacaaaatgttagtactggaaaggatctttttgatcatgtgcaaccctgctgttggatataaaagaaagtggcatgtccaaggttgcacagtgaattatagacagtcatgtcagcactccctgttcaggctctttgctttgcttcctggaagggattggtaaatatggtttataatgtctaaagctaacaggttgaatggcaactaatttgccatgttctcttgcagcaatcagtccactgtattacattacctaccaccatattttagtgatttttaaagtcttttttttttttgtttctttcaaattcatgttcctaaccggatctttttttctcaccccgtttctgagaagcaagtcaactgcctagataaaaagggaagaaccatctctagatggttgttcttctctcttgagaacatactgttagaagttaataaaaagcaatgtgtctactttgatcttttttgtttcaggactgcttgtaggtgagatcttgtctgcagttctaagtcaggaaggcatcaatatcctaacccacctccccaaagggagtgcagaggcggagctgatgagcgttgtcccagtattctatgtttttcactacctggaaacaggaaatcattggaacatttttcattctgacccattaattgaaaagcagaaactgaagaaaaaattaaaagaaggtaaaaaaaaaaagtatttcacataaaaattgggtgattctaaactaatatttttattaaactaatatttaagttgtgaattatagaaaactttgtaagagaattttagcaaaaaaatcatgagatggactctactatataaataaatattatttctgtagcattttggctcaacttaccaaaatgcctgaatgagaggcaaggcacctgcattccaaactacagaacacttccttccttttcgaatgagatcagaatgttctacttgataattcccaattcgagcaattcatatacttcctttgagaagttcaatgctggccacagagcatatgcttgctgcccaacaccaaaggaagcttaccattctcagggcctgataaagtgttctttgagtagaaacggaggtctgttaagcaccgtgttctttttcttgtgcttcttagggatgttgagcattatgtcctacagaaatgctgactactcttacagtgtgtggaagggtggaagtgctagcacttggtaagtagaagattttgagttgcattttcatatagtggttaattaactaaagaataataaccataatggaaactccattcctccagttgctcaggctaaaagcctcgtcatccttcactcctctctttctcttaccgttcacatctgatccagcagatatggattcaaaatatatccttaatttgactacttctcaccacctccaccacactatcctgttccaagacaccttcctctcccacctggattcttacactagtctcccttagtcttctgggttcagcccttgatcctcttcagtatatactcaacacagcaactgaagtgaccctgttaaaacatatgttagatcatgccactcaaaaccatttaggagcttcccatcttacccagagtaaaaaccaaactttttattgtgatttacaaagctctgtatgatctggctccacctcatgtctcctactttatctcctatactctctttccctccaattcagccccactagccttcctcaaacacaccaggcatgcttccacctcagggcctttgcactgttttctcagtctggaatactcctccttaggtgtcagcatgactggctctcatatttccctcaggtctttaccaaatgtcaccttggggaggcctctgctatatcataatgtctaaaattgcaatccactcccctcccaacacctcatatcgtttcttttctcctcagtgtgattactaacgttcttgcttattccactattgtgtatctcccccactggaatataagctccatgcgggaagttctaagtatccctagtgcctggtacctacctggcacatagtagatgctcagtaagtatttattcaatgaaacatatcttccaaaattctgatgatttgagggaaagatagtctgaattaattaagagtccatatggcagtctattttcaaaaaataccggctgggcatggtggctcacgcctgtaatcccagcactttgggaggacaaggcgggcggatcatgaggtcaagagatcgagaccatcctggccaacatggtgaaaccccgtctctatgaaaaatacaaaaattagctgggcgtagtggcatgtgcctgtagtcccagctactcaggaggctgaggcaggagaatcacttaaacccaggaggcaagggttacagtgagccgagatcgcgctactgcactccagcccgggtgacagagtgagactctgtctcaaaaaacaaaacaaaacaaaacaaaaaaaccatcatgctatgacaaaatatttaataaaaacggtgtgccagctgctttgtaggttctatatgaaacatatttaaggagtttacaacctagaatactttaattttagatttttttcttttttcttttttcttttttttttttttgagacggagtcttgctctgttcccaggctggagtgcagtggcacgatctcggctcactgcaacctccgcctcccgggttcaagcgattctcctggctcagcctcctgagagctgggattacaggcgcgcaccaccatgcctaatttttgtatttttagtagaggtggggtttcaccatgttggccaggatggtctcgatctccggacctcgtgatccacccacctcaacctcccaaagggctgggattacaggcatgagccactgcgcctggccagttttttttctttagctattgagatctcccagaattttatctttggccctcttattttctgtaatctcccctggtacagtctcattattgcccatgatttccataacatctaggccaatggccccctaatcaatgtctcaaggcctaacttctttcctaagaagttaggaaatgtcctagatccatatttctaggtttccggaagccaaagatccttcaagcacaatatgtgccaaattcattattttcttcctcaaatacacttctgtttctttactcagtgcacaacaataccctgccctttgtcccccatggatcaagtcagaatcatcagttggtttttgattccttcctttccttttggctttacctctgatcagctaccaagttccatagattataccttaggattaggtctgaccatgtgtgggtgacacacttcaaaagacacacagggccagatacagtggctcacacctataatcctagcactttgggaggctgaagcaggaggatggcttgagcagaggagttccagaccagactgggtaacatagggagaccctgtctttaataaaacaataaaaatataaaaaaataaataaaaggctcatagacccctgcagcacaccaaccagaggataacccaggatgcaggagtgggagtgagtgtcaatgaagactggaaactgacacagcaggacctgggaaatagatgcctggagagcagaaagccccacaggaaggtacaacagcctctcagtaaacactcagagcctttcaagagtttggggcaagactgaaacatacacccaactccatgagttccttgaaagaaataatagacatagaagaaaatgtccagcacctaaataccctcaaacttttcttgagaaatacaaagcagattttttaaagtacgaatatcattcatattagcaaaacccaaaattgatgatgatgaacattttttatattcgtctttttttttttttaaagaacattgtggatattgaacttttctctttaactacaagcctccatcttatttctgtttctttcccccaagggcattcactatcatgagtttatgcatctttccagaacatttttaatattttatatagtatatatatacatgaaatcatatagctgtaacttaactccagtttggctgctcactgctcaaatgccaaactcaagagactaaggttggtgggaggaaaagcaggttaattcaggagccagcaacccaaggagatggcagactagagtcaggaaactatcccaaatgccctaggctggccagagggattttaaagaggaaggggcttggaaaactgtgtgcaagagttagctacgtacaggtcagcatgtcttgttctgattattatcttgagtaacgggccatctagtggtcagctagactgaaacaggtttgtagattaactgctcagtatttttcttctccaggggacatttcacatccttgatttttatctcatggctagttcctggaattcttaagtaagcactgtttaagaaagttaagcattgtaaaagaaagaatggttatttgcttccaaaatgaagtgatgggtttacagtccctttttgtatttctaaatgattataactagtatcatactatacctatcattctgtaacttacctttttcttttaatactttttagttactttagatctagtagtataggtaaatatagctcactccttttcattgccatgcagtattttattttacaaatatatcacatagtatatattctttatctattcctatcttgatggacaaccatttccaaattttaatattacaaacaatatgataatgaacatcttcatatgtctctttgtgcacatgtgtgagagtttctctagggtatatcccaggagatagaattgctggaacataaggaatgcatatttacagtttcatcagattttgccagatttctcttcaaggtgactaaaaaattcttttctactctaaatttttagtcccagaccctactgtaaaacatgaggaactaaactagaccatattaagcacttgtagaggtagcctagggtctggaacaaaagcaaatcaaatagcctacttctttttttcctccatgtcacacttaaaatttgaatttcagggcagtctccaagggacaggtcagtgggaagaggagaacgcaaaaagctagagcgaattgtatttgctttacctttagggaagtgctgtctagactctcactccttaaggataccagggatgagacacccaagagtaccaaagagaaagagagataggagtaagagcttataaaaaccaggtgcagtggctcacacctataatcccagcactttgggaggctgaggcgggtggatcacctgaggtcaggagtttgagaccagcctggccaacatggtgaaaccctgtctctactaaaaatacaaaaattagcttggcatggtggcacgtgcctgtagtcccacctactcaggaggctgaggcaggagaatcgcttgaacctgggaggtggaagctgtagtgagccaagattgcgccattgcactccagcctgggcaacagagagagagtccgtctgaaaaaaaaaaaaaaaaaaaaaaaaagtaagagcttatacctattgaatacttactataatccagaactattttaagtatgttcatatatttaatctttataattgatcccaaaggatgagtccgttgtttctatttattgccattgccttttttcaaagatgtaactaaagcatctttatatatacagatgtatagataagtggagaggcagcctggccgtataactgcactcatatgcctttctagcctgctaaaagaagagagacttccaaaagccaaaatcccaagagagacccaatgtaaaatgtgggccaatctttgaaaatgtgagtgtccttgaacctgagcaatccgtagaagtatttctcatccttgagagcagtgtgggaggattaaaaagagaggagctctcaactcttaccccctaaaagtcaatagagtagaaaataaatttctgatgtttctagagaaagaattaggaaaaggcacctagttgtggaggggcaagttccgattaatatcaaaaaaaaaatctttaaaataattaaatcaattagagcaaagactgagaacaacctaaatgtctacagaaagggaaatggcttaaatagctttggtgcatctgtaccaaaatactataatttaatgtataaaatcacttgtaaaagaacaaggaaactttatgtattaatatagatctctaaggcatattactaaatggaaaaaaagccaagtacaggataatgtaaacattctcccaccattttggtgtggttgggatggaaaggtagatgggaaggctatatcttgtatctactatttggaagaaagcacaagaaacaatggtcatcttctgttgggaggtggagggggacagggactgctagaaggagacttttcataaaatatccctttgtgcttttggatttttttttttttaagttctctcactcaggctggatgcagtggcaggatctcagcttactgcagcctctacctcctgggctcaagcaattctcccacctcagccttccaagtagctgagactataggtgcctgccaccacatctggctaatgttttgcattttttgtagagacaatgtctcactatgacgcccaggcttcacttttggatttttgaatcatgtgagggttttacctctttaaaaaaatgcttaaaatacatttaaaaaatgaaaatgaaaaagaaacacaaattttttaagtgggggaagtgggagagcaagtcaagtggtctgagtctcagacatttgaggacctggggagtggagcctcctgggcgactgagagagtgaagagatgttatggggggatgaacccaatcctctctgatactcttcgatgggtattagtagagacttgaaattgctttttgactaagtaataatgatcattaaaatttcctgtggggtagtaagttctgtgtcaatggcagcactcaaggacaagtgagataaacactccagggacattgggaaaggggacttggggcctcagataggaatttagattccatggaatgcacaaattttacaatctagaattttgtgatttactctttcatgtctcatgttcataggtcaatgccttgactcaaaactatttattttatctctgttatctttaactttagagtgtaattcttatcatcaggaatcaatttttagcttgtgtgctagcggacaatgttgtaatcacagaagatgtgctgttcacatttgtttaccgaatgttttggaggtattccaaaaatcttcccttcctttgtaaaatgatgacttactttggaattgcatgttttaaaatgttattttcttttaaagaataaagttgtataaattaattgaaagtcaaaagggattcagcgttctaaatatttatttatttgattttgtcttaaaggttaacagcttttgctttaagagtacttggacaagtaaataaatacgtagagcagaaccaaaattcaatttgtaattctttattgtggctagttgagaattatcaattagataatggatctttcaaggaaaattcacagtatcaaccaataaaattacaggtaaggaaaccaaatgcacaaattagcaatagttttatttagtttgagttttattctcatctgattatgggaggatgaagaagaagaagaaaaaaatgtaattctgcaagaaattcctttgtgaacaagcaaaatatacaaaggtctttcccataatatctgaagtgaagcgatcttcagacagttcactagagatcagagaagtgatatcttagacctctcgtttaacggggtggaggtagatgggcaagtgaaagcactcaagcgagatagacccagggcttattgagaaatgggaagcaggaagggaaagagtgggagataaggcttaaaacacagagtagaggccaggtgcggtggctcacgcctgtaattgcagcactttgggaggccaaggcgggcggatcatgaggtcaggagttcaaaaccagcctggtcaatatggtgaaaccccgtctctactaaaaatacaaaaattagccgtgcgtggtagtgcacgcctgtagtaccagctactcagaaggctgaggccggaggatggcttgaacccgggaggcggaggttgcagtgagccaagatcaagccattgcactccagcttgggtgacagagtgagactccatctcaaacaaacaaacaaaaaacagagtagaatcaggtcatttcgccttaaagacaccatttcactccccttttaaaacattgcttctttttagggtaccttgcctgttgaagcccgagagaacagcttatatcttacagcctttactgtgattggaattagaaaggctttcgatatatgccccctggtggtaagtaagagttttctttctctcacacccatcatctatttctgtactatatactggaggggccaccaatcagaagaccttttgtttcaaaagcttcttttccttctttccaataacttgaaaataacttaaactccagaattgaaagatttcagaacaatgatagatattagagaccacctagtccaacctactcatcggcagttgagaaagctgaggactaagtaaggtgaattcagtttcccagtgtcacaggctaataaattgtagagctgggtctaaaactgatagctgggactgggatggaagaatgatccagtgcccccagcttctctgtcttatctttgctaaatcctgctttatatgttactgttatcctatagtgaaagcattctgtatcatgcaagtactgaggatacacaacagcaaatgtgtatcctccaaatccttccaaacaacatttgcttggaaacgggagaaaagtgatgagccacctaagtaaatcaacatagaagatttccaaggttgagatggaaaatctcaagtggatttgcaaaactggaagcacaaaacaaaaccatttgttttcagtttgtttcagaagcttaacaagacaaaataatcaatgaagactagttcccaggcacctagtggccacatgggtgagagatgcatgtggagctgggagaggaggcaggcaggatgttagcagcatcgcagcaggctttctgctggcccacttgcccaacacaaccattttggtggcgtcaggactagtgatcgggactatttacccaggcattcttaggatctaaaagtactgtggcagttagggtttctttctgctacttattgttttatttatttatttttttaagtgtaactccttttgaacctgtgtgcctgttgcaactacgctgagagggaacaataaaagttgtgtctatgggccgggtgcagtggctcacgcctgtaatcccagcacttgggaggccgaggcgggcggatcacaaggtcaggagattgagaccatcctggcgaacacggtgaaaccccgtctctaccaaaaatacaaaaaaaaaaaattagccgggcgtggtggcggggcgcctgtagtcccagctactccggaggctgaggcaggagaatggcgtgaacctgggaggcggagcttgcagtgagccgagatcgcagcactgcactccagcctgggcgacagagcgagactccgtctcaaaaaaaaagaaaaaaaaagaaattgtgtctatgctcggtgccttttcttcctggaggctaggtctgacggtgtactcagaaactaaaggcacaaaacctctaaaaggaaagtgagaattcagaggcaaaaagcttaacctgatttggacaacctcattgtcccttccaagattatgctctgctccttctctcggagggatttgcttcactgagaagccatccatttccattaggtcagtcctcttttcacccccatattgcttgctccaggatagtgggatctgagggtagttcatatcaattgataggtggttgcttgacatagaaactgaagtatcttctcttgtttccagaaaatcgacacagctctaattaaagctgacaactttctgcttgaaaatacactgccagcccagagcacctttacattggccatttctgcgtatgctctttccctgggagataaaactcacccacagtttcgttcaattgtttcagctttgaagagagaagctttggttaaaggtataacttgttccatacatgtattcagtgagtgttcactaagacataaagtctgctagtctgggaagtgggtggtgacatgtgaacttgagtaagatgcaattcctgtcctcaaggaacaaaccgtcacaatacgatgtaatgtgtgccgttattcattcatttattcatgcattcattcagcaaatatttattcttttttttaagacaggttctcgctctgtcacccaggctggagtgcagtggcatgatcgtggctcactgcagcctcgatctcctgggctcaagtgatcttcccacctcagtagctgggactacaggtgcccaccactgaacccagttacttttttttatattttgcagatacgagtctcactgtgtttccccggatgatctcaaatgcctgggctcaagcactcctactgcctcagccttccaaagtgctaggatcacaggcatgagccaccacacctgtcctctatttattcctttattcaataaatatgcattgagtatcctatgtacaccctggacaccccctatatacctggcactattccagtctctgggaataaaggaataaacaaaacaggctccccaaaatccaggccatcatgaaacttaaattctaactggggagacacaaacatgataaataaataaagctttatgaatagatggtgatggctgatatgaagaaaaatagagcagggaaagaaaataaggtgagaggatgcattgtaattttagacaagctgactgggcttaagtttcactaagaggatggtgtttgagtcaagagctgaaaggaggtgaagaagcaattcctgtggctatctagaaggaagtacctggtggagaacagcacgtgcaaatgccctgaggcatgggcatgcctggtgctccaagaatggcaaggaggccagtgtgactgcagaggagtgagaagaggagtaggaagtgaggtcaggtaaggaaaaagtgagggagcaagggaaggtcatttaaggcattagagagactcttcagggcttctgtaaacagttgtgccgtggacaaagtacctaagcaatcaagtgaatcgaggctgaaatctagcctgtgctccactcccccggccacataccctagtttagggctgcttccacctagagcaaggagtgcccatgtcttatccacagcaatgtgctgtggggaccagaaggagccctagaactttaatttcagctttgagagtgaaaaggggagccactgggggattttgagcaaaggagtgcatgacctggcttatattttaccaggtttgctataaaagtatgtgtttggttttgaagaataaagatactgcttcctataggtcaagagacaaaaaatagaaagagagtagcagtgattattagcatggttgggcactttggagtcctcttctagctaaggctttataaatcttactgaggtttatgaccatctacaaaatatgatttgtgccatcattttaaaattactatattttaacatatgcctcaaaaccacttgtacgatacttcaaaaataacacaaaagaaatgtcttgggtattgtgagatatgggtcataaaatcataaaatttaagatctagaagggaacttaataatccaagagttgttccagttgggtttctttaaaatcctaaactcaactcttcattttaaatacagcaaatctgagactctgagaggaagggtcaatatcattttcaaggtcatgcaaataatgtagttatgaattataaacatacacatcaaaatttttactaaccttcaaatatgatttccaaatatgcattactttttttaaaacaaatagtttgttccaaaaaggatttgaggtttacaggtttaaataacaaatataatttacagcctaatttatgaaaagtgctgcatgtacgaaattgtcttgagtgctttaaattggaaagaaataatgaaagactgaactaaggctttaggtttaatctcataatttccaggatgtaaattttcctatcaggaaaaaggttctccagtttattttttagtgtcagtaataataataataataataatcccttatatatgcatggtgctttctagtttacaaaatcttttactttagtatttcatttgagtttcactgcatggaagaaagtattatctatactataggtattaggaaattgagtcacacagaactaaaggaatttgcccaaagtgacatggtaagttagcaacaaaagaaagactagaagctgggtgcaataccagtttattgcactttcgactctactaaactgccccttcctagtacatgtgtactatgttgattttaaaatacagattgaggccgggtgcagtggcttatgcctgtaatcccagtactttggaaggccaaggtaggaggattgcttgagcccagtagtttgagaccaggctggataacataacctggcatggtggcacacccctatagtcccagccactcaggaagctgaggtgggagaatcactgagcccaagagattgaggctgcagtgagctacaatcacaccactgcactccagcctgggtgccagcaagatcctgtctcaaaacacacaaacaaaaaaaacaaaaaataggttgagtgttcctgatctgaactgcttgggaccagaagtatttcagatttcagatttttttcagattttggaatatttacatatacataatgatatatcttggggatgggactcaagtctaaacatgaaattcatttatgtttcatatatactttacacacagcttgaaagtaattttacacactattttcaataattttgtgcatgaaacaaagttttgactgcattttgattgtgacccatcacatgaggtcaggggtgaaattacccacctgtggcatcatgtcagagctcaaaaactttcagattttgggggcatttcatatttcagattttcagattagggatgctcaatgtgtaaagacaagtaataccatattaagggatctcgttttgcattggtcatcttcaggaagttcctctaacaagaaaaagtaagtagcttctagaaactggaaggccataatacacctggtagaattattatgtcaaattcacatttttaatcatattaatgaatggaatttgttgatgttcaggtaatccacccatttatcgtttttggaaagacaatcttcagcataaagacagctctgtacctaacactggtacggcacgtatggtagaaacaactgcctatgctttactcaccagtctgaacttgaaagatataaattatgttaacccagtcatcaaatggctatcagaagagcagaggtatggaggtggcttttattcaacccaggtaacatttctttgtcttgtttcatctccctgtagacatttttattttctcccccaccacactcatctggcctccatgcctttgtccaccaaatgagcatgcaatagatatgaataatgcctagaattgaaggacccctacaggttatctgcgtcaacactcttattatacagaagaggaaattagcccagggagttttactcagggaattcatggcagagccagaatcagaactcatgtctcctgactttaagcccagtacttccttcatgattctaaatcaccatgaaaggctagtaaggttattggcaattatatcatatcctatgtaataaatagtggttgccatgtagacaaaggtactgatgctccttctccacaacgaaataaataaaaagtgggagaaatactgattgttacatgttaatctatctagctatttaatgtaaactcatttgagtatgtatttttattacaactaattattatgtagtcgtataatacatgtttatattcaaagtttagatcgaatgttaatatcttccctgttgcctggatgtttagataatgatggagtgtgtatatttatatatatgtaatttagatgtagagagggccttcagtattaatttactgaccatgtaatgtgttttattttgggtacaattatagggttagcagaaaagactgccctattgattagcatttgccgccacagatataggcagagggaatggccacattgtttaacatctctgatctagtcatgtttctcagttttatagatgagaaagatgaggtccagaaagataaagtttattcatttattccttcaacaaatatttatgtacctgctaaatgcaatggacattgccttagtccattgtgtgttgctgtaacagaaaaaacgacacactggataatttacaatggacagaaatttattacctcatggttctgggtcctaggaagtccaagatcaggggggctgcacctggtgaaggcattcttgttgcattattccatggtggaagggcaaagagaaggcagagtggagggttggtgggagtggagtataaactcatctttttataacaaattcacttctataataagcagcattaatccatttatgaaagtggtacgccccatgacccaaacacctcccattaggcctcacctcctaacactgccacattggggaccaagctttccaacacatgaactttgggggacacattcaaaccacagcaggcaccaagaaaaatatattacctacttgcctcacaaatcttatattgcagtggggtaggccaacaataaactataaataaaagcattacaaattgagatgaatgctagaaagggcaaaaagggaaccttaaaacagagaataacgggaaaggggagtttatggccttgttgtggagatacttaaggtcagactaaaggatgaggaagagataattgttcaaagactcagatgaattctgcaaacagtgacttgcctgaggttacatttgcagaatatatagaggacccagatctgaggccacacttccttcctgtccctgctaacagcatctttattgaggagggagagacctttcttccacctccacaatggggctcttaaccagtcttactgagtcagctggagtttcatctccagacaatgctgccctaccctctcataaaaagggcatttgtaaatagggagtacataaataaactaaacatatttttgtgccttgctgattgctgacaggacacaatcaatgccattgagggcctgacggaatattcactcctggttaaacaactccgcttgagtatggacatcgatgtttcttacaagcataaaggtgccttacataattataaaatgacagacaagaatttccttgggaggccagtagaggtaaatgaagaactttctgtagtattttacaattggctgagaccattgaaatcatctgttccactctttattttataaatctatctcttcactacttaaacatatattgagtgtcagctatgtcctaaacagggatgcctgctatatcctgggcactgaggattcaaaaataaaacacaaacaatcagcgtagtgcagggagattgtcatttaagcagatagtgaaaaataagagtcttgataggtacatggaagtacagaggggccctcctgatcctggctgaaagatggagggagtttgtcagatgtgtccagatgtgtgggttaaatctgaaaaaatcagaatgagttagccaagtgaagaaaaaggaagaacattccagacatagataacagcgcacagagcagtacagtgagcgtaggagggaaggcatgtctgggaggctgctggtggtcccttctggccctggtcatacatgcagactgtggccaggttggagttggcctttagggtccccagctccttgccccatgtcctttgctactgctggatttttaaaggtggtaactttgatggcttatgaaaatttcacaaagaacaagacatgttggaaaaactgggttctatattaatattagctgcccacatatagctgctgatacatatttttctaattactgtgtttgcattattttaaagtatatttaaatgtacagtaattggaaataatcctcattgttgacatccttcacaaattggtgtttgttaaaagtaaacaagcatgagaaataattttttttttttgagatggagtttcgctcttgttgcccaggctggagtgcaatggcgcaacctcggctcactgcaacctcctgggttcaagcaattctcctgcctcagcctccaaagcaggcgggattataggcgcctgccaccacacctggctcattttttgtatttttggtagatatggggtttcaccatttggccaggctggtctcaaactcctgacctctggtgatccacccaccttggcctcccaaagtgctgggattacaggtgtgagccaccatgcccagcagagaaataaaatttaatgcaaaaattgcaaactggtggcccatactgaaaaaaaagaatatggatataaacatagacatagatatatgccaacatttaaggatccagatatttcaaataaaaacctgattcccaacttcccttgataaaccaaaagacctgaaagcaaagcaccaggcattggcatggcttctacaatttactgcagtccccaccagtcacaggacgtatgcatgtgcatttatgttcatacctgctttgtgcccgggcctctgcaggcatttgtgcttgtggtccctagtttgggaatatgtctcctttccctgggatcatttagagttcaccggagattcatgttctgagtctaagctctaagaaggatctcttgaccttccagctacctgaggtagctgaaattattcttctctatagggataatgctgtaagaggcctcttgtcatcctaacaaaatttaaaccccagcccaggatgctgcttccatgtaaaacctgggctgttattatccagtgtggaattttctactccagcatttcctgaaatgtgttccatgaaagagtgttaggtggttgagtgtgcattaattaagttaaacaaattaatttaaattaagttaaacaagttctttaatccagaattcccctgttctgtaacatgtatgtgattaagtgtggtgactctgggtgtgaaaaggggcagaggcagggcacagtgcacagcatttcccaaacttatttgtcatgcatgcttttcacatgcagtatctcaagacacctgttttccaacaaatgctgctatattctatcagggagaacaagaatgttgacctactttcctacatttactaaaatttgaaggaaggattgagaaactttaacatatgcccaatccatcttgcattattgtgctaagcaaaggaaaggggaggcttggagtaaaggaagtgccaacccctcgggctcaaaattatctctcctgtactttccacaaattagggagcatttggatgacagagtttctctggagaggagaatgacttaactccgtttatgtcttcagtttcctcctagcagagtgggaagaagagcagcagcaactaaggatttggcaggcttgagtggggtgctagtggtttggggtggggtaccaggggtttctgcaaacaaaggcggtgacaagtggaaaagataaatcatcaagagatggaaaaggggtgcaaaggaggagctcagagaggaccaaagatagatgcacccgctttcaagttatgtggaggttccctgctctgggttctaatgaaaacgatctccattggcacacaggatgctgattcctgagctaggcacagaaaggaatttattcagttggcaaaaggagatgaagatccagatttaccatagccatatgtaaatgaaaatgtaaccagaagtgacctctgacatgttgcttttgttggttcactcaggagatctcagacatcttatttacatgtagaagggaaaggggaaataccagccttgtttagcacctgccatgggcataggattttcagtgtctcatccagttactctcagaagagctctgagagaggaggctggtacatgtcaacccacttttcatagctctatcctccctccctatcaaatgatgaaagaaagcatggtttgtttctctattatctttccaggtgcttctcaatgatgacctcattgtcagtacaggatttggcagtggcttggctacagtacatgtaagtatttaattgatatccaataacgagttatgtgtccatttgtactaggtaacataaaagttaggagctttgccacaaagtcacagaaatctgggcttgggtaaccatgactaaagtgggattcacttatgtaaatctttctagcaatctttgtaactatcctcacaatttttttgaaaataacaatgttggtcaggcatggtggctcacgcctttaatcccagcactttgggaggcctaggcgggcagaccacgaggtcaggagatcaagaccaccctggctaacacggtgaaaccccgtctgtactaaaaatacaaaaaattagccgggcatggtggcgtgcgcctgtattcccagctactcagaggctgaggcaggagaatcacttgaacctgggaggcagaggttgcagtgagccgagatggcacaactgcactgcagcctggcaacagagcaagactccgtctcacacacacaaaaaaatttaatccttatatgtatacattctgtatacttatagaaattatatatatttatagagatatataattttatgattatatatgtgtatacgcatatggcatatgtgtatatacatatatctgtgtacatatgtgcattgtatatatatatgttttctatcccatctcatttatccaggattttgggggatttatgtgttattcataaagacttatttcttcattttagccacttggcagttgcaattttttttctttttttttttttttttgagatggagtcttgctctgtcacccaggctagagtgcagtggtgcaatcttggctcactgcaacctccgcctcccaggttcaagcaattctcctgcctcagcctcccaagtaggtgggattacaggcacatgccactacgcctggctaatttttgtatttttagtagagacggagtttcaccatgttgaccaggctggtctcaaactcctgacctcaagtgatccgtccaccttgacctcccaatgtgctgggattatgggcgcgagccaccacgcccagctggcaggtgcaaatttttctaggctgtttaagtattttcatgcattcttaaattgcatgttctgagcataaattaacatcctattaataattttaatcacgctcttatctttagtgcattcattccttcaaggactgttgtaagtttatatgggggaggagagattgtccacttttctgccacttctggttggtgtcaatatatctacttctggcagcacctctgcccattcatacacacctataatttgttgtttgccatgatggcgtgtggctggaagaaacccacacttcttagccttgtgctgttgtgtgtaaaattaaagtggaaaggttcaaaacaagaaccttgggaactctcctgtagagtgaggtgcccagatttgactgcatggaatttagaccaagcttctgaccggccagaagtcattttttgcttactttgggcctctcaggtttagattatggagtttgcttaaagtccagctgctggaaaaatgagtcactaatgtacaccatttgtgctggattatgaaaatgatccttcgagcatcccatctgcagcagcagtgttgccataatacctttgtcactttcccactttaaatagaatcttcttgcttacttgtccccaatgtaggtaacaactgtagttcacaaaaccagtacctctgaggaagtttgcagcttttatttgaaaatcgatactcaggatattgaaggtaaaaacagcaggatttacgctgtaattttggctaaaaataaagcatgtgtataaatagagagcttctctgattagtaaaaatgtgcttactcaaaaagtgaaatttcttaaccaaatactttagcaggttgacatccaagtaaatattacttccattttttacaatagataactctttaatatagtcggaagctaatattaaataacaatgactaagctaaatgtatttgctattgatcaataaattgttttgactatgttatttttaaagagtgtaactagttgtaaagccacattaaggtctaattccagaaccaggaatttctgttacttttgtgttagccttccaatctgggaccttgaattctcttatcaccctgttagttttccatcccttagcctttctgtattccaaggggcccagaaaataaacatttctctgcctccatctttaacttagtctctcctgtacccctttcttttttagtctctcctgtaccatcctttctttaaatgtacccctgacccttttatttaacccaaggccctcacatccctctgctggttggttctcccttcctggtccaaaagcaagtccacttgcacactccagtcctcctggtctccccattgcctccagggtcagaatgaatgttgctgcctctgccctgatattttccatctattgctcagaagcctgttcctacaggaaacttcccaactaccagcaaattaaggcatctgttcttcctccctccaacatcccccaaacatattaccaatacatatttatctttaataatttcttcattaaattataagttatttgagagcaatgaactgttaattatttaaagacttcctggtattgtcaatagccatgaatttccattagaaccactgaaagtatctaaacttccaaatcacaaatcatttttaagtgtgttcaaagatttgctcattaatgattctgttctgacaggttccaaagcagctgaaaacagtttactcttatatttgtctgtttgttttcttgtcttatgtgccagcatcccactacagaggctacggaaactctgattacaaacgcatagtagcatgtgccaggtgagcctatttccacaaaggggagcatagactccaagttctcatttttgttaacgtattgtttctttacatattttcaaattttggtatgtccagaagatacaaaattgttcaattgtttaaaaatgcagaacatatatattcttaaattgctacttaccataaaaaacagccttggttttgctcataatagttttctctgtctgttttgtcttctgattcaaacagtgtaatattaattttttctctttcagagggatagaaatgtgatttaaaaaattaggaaaaaaatataaaagattctctcaaaaacagcccctactctcttacttagaaaaatcacatttacctaacaaaatccattatcagctagattctcaactcaagctgcacattgaagtcagctggagagctcttagagctgtccaaatgtcccgggctccagaggtcattctaatggtagccagggttgagaaccactgatgttaaaccctctcccaactaaataccgaggcctcaattggccactgtattagtttcctgttattgctaggtaacaatttattgcaaatgtaatggtttaaaccaacacagttttactatcttgcaattctagaggtgagaagtcccaaaatcaaggagctgggtagggctgtattccttctggaagctctagaatttctttgcctattccagattctagaggctacctgtgttctttggcttgtggcccctctctgtcttcaataccagtgtcacagcatcttccaatctgactgtgacctctgcttccatcatcacacctccttctctgactctcctgcttcctttcctcataaagattcttgtctttacattaggcctgcacaaataaccccctatctcaaatccttaatttaatcacatctgtaaagttctctttgccacataaggtaacatattcacaggttcaggggattaggacatggacacccttgggggccattattctgcttaccacagccaccatcctaaaacatttatgaaagtgtaggttttttgccgggtacagtggctcatactgtaatcccaacactttgggaggccaaggagagagaattgcttgagcccaggagttcaagaacagcctgggcaccatagccagaccccatctctacagcaaattttaaaaattagccagacatggtggcacacacttgtagtcccagctactcaggaggctgaggcaggaggattgcttgagcccaggaggttgaggctgcagtgagctgtgaccacgccactgcactccaacctggacgaaaaattgagaccttgtctccaaataaaaaaaaaaagaaaaagaaaagaatatgtaggtatttgaaaatatgtatatacttttggctttggtgatcacacagtgtgatcagagagtggtagagccaggactgaaacacagacttcttccctgttctttccatcgtccctcagtcctttctattgtgttctattttcttaactcttgtattgtcaataacagtgatatctgtggatggcattttgctgattttacttataatcatgcacccagtgtggataacttggaaattcaatagtgttgtgcaaaagatgagagctgagaaggaccttagggatgatatcataatcctcttgttttggaaatgaagaaactaagacccaaagagataaagtcgcctgccaaatgctcacagagttagaggcagagctaggggctcaaatccccaacctctgatgttcaatccagtatctaaaccacatcttttttttttttttttttgagatggagtttcactctgtctcccaggctggagtgcagtggcgtgatctcggctcactacaacctccacctcccaggttcaggtgattctccttcctcagcctcccgagtagctgggattacaggcacatgccaccatgcctggctaatttttttatttttagtagagatggggtttcagcatgttggccaggctggtcttgaactcctaacctcagctggtctgcccaccttagcctcccaaagtgctgggattacaagcctgagccaccacgctcagcctaaaccacctctttcaatcagtgtaatctaagaccactaatcccaaggaacagcacatagtttctccctgcctccctcccagctgtttcccagtcttctctatgtcccaagcccaatcgcttcttaggattccttcactattcagccctatttccttcctcatcagcatttcttccttccagcatttcctacttccttctgtggccagtccctgctctctgttcccgctcaaacatctttcctcattccctaatgtctttccagtaaggtcgccctttcccaggcagcttctttccccctaaatgccattcctacccttgggcacctaccagctggggaggagcatgatcacaattacctttaaatttgtaacagttgtcaaagggaagtgtaagcaaacttctgggcagagctcgaatcagtgcctgggaccctacagggaggcatctagacttgcaataaagaagagctctctgatagggtgagacacctgtgggatagcctctaccagtaagaactccagtgaccttcaggaaatcagtttacttctccaatcctcttctataaagcaaagatattgcactaccttatctcaagttttctgccagttctaattatccacaattctgccgtacagaaaaaagctgttatcaaaaattcattcatttgacttcattgtcaggaggcctaattccagattatcaatatacaaaagaaagcaaggagaaatgcaatcttgaatagtctatcctttggtttttacaaattggggacaaaatgttccagaaaggcgggtggaatatgcttttggctctgttgacactgaagttaggttgggtaaattccaaaaggaactgtgtagtacttattcatgtaggaacttctttgccttcaaatattctctctcctgattaaaaaatgccagcatgaagtttctgtgttcagagggtctctttcgtgtatttacctttttacaacctctctgttgtattcctaagaaaagaaaaaaggatttcatttccctcacaacaaaatgcctttggggaagattgctggttttggcagcaggcaaagggcttcttgaaaggaggatttctgttccaccattgaaacagtctccatggcaaccagtcatcaaggctccagcaaccttttcatagacactctccactcgggaggcccttttccatcctgctgacaaagtgtttgcatctgtgagcaagagtgctctgcttctacccatccaattagggagatgttcggatgtcacattagagttccaagtgttttatattctgttctaaattgttaatttggtgaagaatagggttaaatttttatgagtcagagattttagaatacttttctttattgtggcaaatattacatctatgacttctaatggggactgcttttatttatttatttatttatttatttatttatttatttatttttgaggcagagtcttgctcagttgcccagactagagtgcagtggtgcgatctcagctcactgcaacctctgcctcccagcctcaagccattctcgtgcctcagcctcttaagtagctgggattacaggtgtgagctaccacagccagctaatttttgtatttttagtagagaagtggtttcaccatgttggccaggctggtctcgaactcctggcttcagctgatctgactcagcctctcaaagtgctgggatgacaggtgtgagccaccgcacccagctgggactgcattatatatgctctatgaggtgtcattgaggaaaagatatgccctgacccctcactaacttgcttagtatctcctcttccaccaacattcatacctgtaggtgagatcaattcattttaccccttatgaagctgtcttttaatttcttcctttaatcctgactgctctcccaagcttcactctcaaacatccagctgcctttcaagcatcttgaggtgaggctggaacctgaaatcaacttttacagaatcacactccgtctgtctctgccccagcctcagccccgccagcctgtctcttttatgtcttctaacatctcttaatggtagctctaagcctctgccacccaaaaccaaagcctgggaattataaagataaatttaaaacacaaacttatacttcttcacagttaattttacaaataagaaaatgagcttagaaaggggaaatgatttgtgggaatctcagaactggaataaaacccaagtttcctgattctccatttcagtattcttttctctcttacaaaacaaaaacaaaaacaaaaccctcccattgtgccctttttgcatttccgcttaaattcctactagcagaattcctactgaaaggacagtccttgaaacattttctatataaagtagctattatgggaaatatagaaaatagagaaaagcatgaaaaagaaaagagataattgcttataatctcaccatccaaagtagctactaatatttgtgggtttgtttgtttgtttgtttgcttttaaagagggattctcactctgtcgtccaggctgaagtgcagtgctgcgatctcggcgcactgcaacctccgcctcccaggttcaagcaattctcctgtagttaggattacaggtgtgtcccaccaagcccggctaattttttttgtatttttagtaaagacggagtttcaccgtgttagccaggctggtcttgaactcctgacctcaagtgatctgcctgccttggcctcccaaagtgctgggattataggcgtaagccaccgtgccttgccttagtgtattttcttccagcttttcctggacatgtttattgaatctcttttcaacatacaactgattttttccttggaatatgcttcattagaaaatgaactaacgtgagaatccaaagacctggattcttctgtagctctgcatgaattagccatgtgaccttgaaccagtgccttactctcatcctgagtttccccagctagttagcttggtgtggatgacttctgtgttccagtagagtggtctgttgagattattgatcaagtgaggaaagagaatagatgactcaaagatctcttgcaactctaaagtcagagattttaacccatacattgtagaaaagcaaataaatggagacccaaatttaaaaattaaggtctactaaggaagagtgtcctttcttaaagactcttattcacttatttattatattttctaacctcttttttattttagctacaagcccagcagggaagaatcatcatctggatcctctcatgcggtgatggacatctccttgcctactggaatcagtgcaaatgaagaagacttaaaagccgtatgtgttttcttttaaatcgtgttgtgaatgcttcattttcttttctgaattattttatagacaattttactttctttcatttgaatataccacttttatagaatcacccagaatatttttttttttttggaggtggattttcactcttgttgcccaggctggagtgtgatgcagtcttggctcattgcaaccgcacctctcgggttcaagtgattctcctgcctcagcctcccgagtagctgggattacaggcatgcaccaccacacctggctaatttttttgtatgtttagtagagacgaggtttctccatgtcagtcaggctggtctcgaactcctgacatcagggtgatccactggctttggcctcccaaactgctgggattacaggcgtgagccaccaggcctggccagaatattcttttcaaaacataattaacctaagttttgatttatcaaagtgaagcagaagcatacactagcatgctctgtaaaatatgagtttatatgctaatgtgttcagactttttcaagaagaggaactgctcttcaatttctttgaattacagatcacatccctgcattgtgctatctcatcaacaggtgaatgcatttaaacaaaaagataatgaaatgaaattcaagcttctctcttttcccccttagcttgtggaaggggtggatcaactattcactgattaccaaatcaaagatggacatgttattctgcaactgaattcggtaagctccacctgcaaccatttttcctttactattactattcaaaatatacaggctaaaagattataaatatcatctctccataatttccttaaatccttgaatttgttaaacagattccctccagtgatttcctttgtgtacgattccggatatttgaactctttgaagttgggtttctcagtcctgccactttcacagtgtacgaataccacagaccaggtaatcaactccatgctaacatttcttcagaagaatactttgtattctttccagaacatttagaaatccactagagtcctgtaaattttatgtattgcctctcttagggaccactcttcatgaaagtcccaatttgaacattcaaaactactgcatacaaaatattgtacataaactacttcttgacattgagcagaccgtttcacctcagtcctcagtttcttcatatttaaaataactggattatagtgcctccaacttcaatattctttgcctcaggtttatctatggtgttcacagataaatcatatctctccttttgagagaaatcaactcaatccccccagaacaacttctagcccatctatattcttgttacactttgcagatagctctattatagcagctgtcacattgcattcaattatttgtatgtctttttcatcaaccccagggtgttttcattcttgtgtccctagtatctaacgcagcgtcgggtatagaatgtgaactcaataaatatttatgaatgggtgatcccacatttgactattcagccatttttgagaatgttatgtggttggagagcttattggatcacaagacagatgactccaccttgggcagttctacttgttagaaaattcttgaagtgaaccaaaactctgacacccattcattctagttttatattctgaaatcacatagaacatacatagtccctcttccccttgagatagatatatagagatacatagatatatgcttttcttcccttgtccaccctaaacaattccaactctttcaaaagatcctcatgcaacataatttattttcctcttacttagagaagcatcaaatgttttatttctgagaaacgagtgtttcaagcacagaactaagtgaaaaaggggagatctttctgagggtagcggaacccttcccaggacagccaattcataattttacctccctgggccttagctataaaaagaagggtttaaaataagcaatctctgaggctccatgtaagacacttgccaattagtaaatgtgttgttcttcaatcaaaccacttctcttaaccacacttttgttgccacagataaacagtgtaccatgttttatagcacttccaatatcaaaattcagaaagtctgtgaaggagccgcgtgcaagtgtgtagaaggtaaactttatttaacatatttaggctgcatgcttatttaaagcagtcgttcataacctgaggttaatctgggggacactgtttggtaaactgttctttctcagaagtagaaatgctatctcagctaattgaaagctaatgattccttgagcattgtaaaactacattttcacagttcctgaacaacctgatagttcatgctgtacagaggcagggaaacaccatcgagagggttgttgaatattataggggcaacatgatgtgagattttactttcacctagtctttttatcatataagacaagaggctcagcactgaaccactagcttctgttccttttctcttatacttcccagttaatggaattcggtttattgtccagttccatttagtctttcctaaattgaagaaagccttcttggccaaggaaaagatccagaactcaccaataatcaacagctggctccatgagggtctcagttagttttggttttttcaaaatcctcaatatctacacattttctaggtacttattgtgccattttatagctataaatcagtcacattatcattttgggtccttcaaaggacttctgattatactcaaaatggaaaatttccccctttcatcaagggaaccacatacatttctaaagacctgaatgtggagtagccacccagtctaacaataagtcttatgccaggggtgtccaatcttttggcttcagtgggccacattggaagaagaattgtcttgggccatacataaaatacgctaacactaacaatagctaatgagctaaaacaaaaatcacaagaaaaatttcataatattttaagaaagtttacgaatttgtgttgtgccgcattcgaagctgccctgggctgtgtgctgcccacgggccatgggttagacaagcttgtgacatgctcaagattttgttttttgtttttgtttgttttgttttctttatgtaatatttcactttatgaaagaaaagaaaatgggcaggtcttagaaatctgacatttgtaaggttatattgggttgtctctgggctcatgagaaaccgtgtttactcctggaaagagtgtctacttctttccattaaccttatttttaccaattttcacaaaatccagctgattgtgggcaaatgcaggaagaattggatctgacaatctctgcagagacaagaaaacaaacagcatgtaaaccagagattgcatatggtgagttcaaaagttcaatatagctcctttaaacatgaaattttatgaatatgtgttcagttagaaagatcaaaaactttatatagtgattatatgaatacaacattccatgtgatcccctgaaggaaaatgccatcgatttttagcattaacatgcaaagtttttattcctcagcaaagaaatgtgattttcattataaataatagaagtgacatgtatacccagccaggatactttcccacaatagagctttttcaattacaggcactaaaacatagtcaaagggaacttttgagaagccacagaggtataagatttcagttctgtactcttccaattgatagaccagaggcagaggcaaaggtgatttagggggcttggtttttaaaaaaatatcttcagggtaaaaatataaataccaaataatttttaatatattcaagattgcaatccatgtttgagacactctccatttgaaaaagcaaatctcagtgcttctagttgtccagcgcttagagctaaattagtgttcaagtacagttgtagccttgtctcagttcctgataaaattagctcctttgttatctattcagtttttgatgtttattgctggcattttttgagagagagagagcatattgtacactatctcaaatcattttttcattttgaaattggaagggtggagccgggcgcagtggctcatgcctgtaataccagcactttgggaggccgaggtgggtggatcacctgaggtcaggagtttgagaccagcctggggcaaacatggcaaaaccctgtctctactaaaaatacaaaaattagccaagcatagtggtgcgtgcctgtaattccagctactcagcagggtgaggcgggagaatcacttgaacccaggaggaggaggttgcagtgagccaagatcgtgctactgcgctccagtctgggcaacaccagcaagactctgtctcaaaaaaaaaaagaaagaaagaaagaaagaaagaaagaaagaaatttgaagggtgttatttataaattaaaaaaataaacacagccaatttggtactttgtgtttagcaacagcttccataaacagtttctcattgcaatggaaagggttctcattcttacggaaagggtctcgtaagaacttcatgagggctgggtgcggtggctcatgcctgtagtcccagcactttgggaggctgaggcaggtggatcactttgagctcaggggttctagaccagcctgggcaacatggcaaaaccttgtctctacaaaaaatacaaaaattagctgtgcgttgatggctcatgtctgtagtcctagctacttgggaagctgaggtaggaggatcgcttgagcctgggaggtggagattgcagtaagccattgcactccagcctgagtgacagagtgagaccctgtcaaaaaaaaaatgtaacagagtattatcactatttaccagtgaagaaactgaggctcagggagattaaataatttgctcaaggtcatgcagaaagcaagtaatagaattaagatgcatcctgatctccagtattttttccatcgaagtctactgaattctcttaatagtaattcaggcaacagaataagttttatatggttaataacttttctttctttgaatttatattgattttggaaaaaaaaaaaagctaaaaagctgcctgactcagcctaggcccactgcagtttgttaaatacatgaagacttgagaatactatattgttttaacaaacaaaagttccactaaattatttcttccctccattttagaactattttaaatctaaaatatcagaaatctattttaacacagagaataaatgcaatttgggtttattgtgttgtttcaagaaaagacttcgctggctttttctggactacaagccagaataacagaatagaaacaaaattaagtagttctctctctgtacccaggcccacatagtaagtacattgcccatgtccattataaagacttatgaatctgaaagtcagaacacttttcatgcattttaagccactaatttacatagcccctggttctgccatgatgagttcacctagctacctctcaatcagtcaatctatatctgggatagacttaaagacttgagggatatctagaatgaacaaatcttttaggtcactaatttcaaaacaaaaaatagatcaaaagcaaaaataaaataaatctctcctgaggccacatagaaagaatgggtcccttcaagctggtctttccagacctgaggtcaagcacattatgcatcaaacattgatatctgaatgaagggaaaacaggattgtaggcagctcttgttaggtagttgccaagcaagggtgagtgagaaaacagaatcatcctaaaaaccaaggattaaagccagtggaactatatgaggaagcaaagcaaggaaccaagaaagctcacatggtagacctgaatgagagataaggcctcctctgtggccatggagaagagaatgaaggggctcttcaaaagatgcccatgggcatgactccactcatcttaaaggatcagcctctgaacttaacatctaacaaaggtttatcttgtttgtttgttttatgtgcttctgttattttattaaatatgtctcttattctaatcagcctgttctataacattggccagggctaatgattctaatagattgagagattgaatcagactgaggggattggggaaggcttcttggaggaaataagaactataatagtttgccatgcttcatttctcgtgtttgacaaattctggcttctactggacatagcattaatagtattaagactgaattgtttcattgttgtttgtcttttgccagcttataaagttagcatcacatccatcactgtagaaaatgtttttgtcaagtacaaggcaacccttctggatatctacaaaactggtgagaattcattcgttcattcgttccttcattcagcaactatttagtactgactatgtgccaggcattatattaaacacagaagatacaactcaaataagacagagctcttgcctttttaaagcttatattctacttggggagaaacattttttaaagatgttcgtataaatatttctcattgaattcatttttctaaaacttcagcaaaatgtttttttcaattgcgtaattgtccaatttctttttctttacaacttttattttaggttcaggggatacgtgtgcaaatttgctacatgggtaaattgcatgttttgggggtttggtatatagatcattttgtcacccaggtaataagcatagtacccaataggtaatttttcaatcctcaccctctaccctcaagtaggctctgctgtctagtgttcccttctttgtgtccatgtgtactcactgtttagttcccacttataagtgaaaatatgtgatatttggttttctgttactgtgttaattcacttaggatagtggctttatttctgggtgctgtaacctgttccattggtctacgtgtctttttttgtatcagtaacatgttgctttggttactgtagccttgtaatatagtttgaaatcaggtagtaggaggcatctagctttgttctttttgcttagaattcctttggctattcaagttctttctttgttccatatgaatattaaaatgtttttttctaattttatgaaaaatgataggaatagcattaaatctgtaaattgctttggacagtatggccattttaacaatattaattcttcctatccatgagcgtggaatgtttttccatttgtttgtgtcatctctgatttctttgagcagtgttttgtaattctcattgtagagatcattcacctccctagttagctgtattcctaggcatttttgtgtgtgtgtggctattgtgaatgggattacatttttttttttgaaatgacgtttcactctgtcacccaggctggagcgcagtggcacgatcttggctcactgcaaactctgtttcccaggttcaagtgattctcctgcctcagcctcctgagtagctgggattacagacatgcaccaccacgcctgacttatttttgtatcttagcggagatggggtcttacatgttggccaggctggtcctgaactcctaggctcaagtgatccactcgcctcagcctcctgaaatgctgggattacgtgtgtgagccaccgtgcctggcctcatttcgattgatataaattttgcaataagtaggaccataaagctaaattgcaataatatgtttatactaaatttttttctcttttgaaattctatcaaatatttcaagtcctaaaatgcttgattttttttcttttgagacggggtctcactatgttgttcaggctggtctcaaactcctaggctcaagggatcctctctcctcagcctcccagcttgattattactaaccataccctagagtttaaaattctagtaatatttttcaattttgtatttgctttatcaacactttgataattttttttaaatttttgttattttgaaagtttcattgtatgaaacttatttgtgaagttattttatttttttcttcattgatggtcacaattttttaatttgcaggctagttgccattctaatgaaataagtgtttagaactttgatgttgccacagtccaacttttgagcaacattttcatccaatgttcatattacaagcagtaataagccattctctttttactgaaataacaaagtgcttttcattccagaaatacaaattatttgttttatttgatactgattcttgcatagtatcaaaagacattttagactgttctgaatttttcatagcatcggatggttcccaagctacaatttttttattagtatcatttcttctttgttctcctgtagatccaaagatgcattttatgatatttaaaaggaaatgttaagaaacattggcatacttcatctcctcattctgggcccatttttaacacataaattttgaatttttataaatataaaaataccacacactacttacagaagaattgtggcacagtgaccataagccatttagaatcaagggcaaactgtagtttgaggataaggataaattggtatttctccaaagcacagagtgcttagaataggtaaggatatagaagaataaaagtttagttattgttgaagcccagggtagttgcctgttctctcttctgaatatactttaaattttccatgatgagaagcttaaaaaataataaggccccacacagctacactgcttactatgacaggggctgaaatggcagatagtactggtaatgttgctcagatattgacgtaataggaatctacaccatcagggcagcctaagaaatcagcttgaactaatgggtgtacactgaaatttatatcactaatgaaagtttaccatttacacagtttctattatacactatttgccaattggttcagaagtttttcaggacttaacaattaagatgactctgccagaacttaatagttaaatatcagccctgtatatatagcgataaatcagacacagtccatgccttaagaagtttctagtctagctagaaggacagatgtgggacaaaaaattgtgacagaaattcaagtgtaaaagaggtaaagaggagacagaaagatatttaaaacaaagagcatccaggaatattttactggatactgtgagaattgaaggagactttcaagataaatgaaattcaagaggccaacatggggaggaatgcattccaggtaggggaactggctacttgtgagttctttgagaatcccaaaattactatctttgaagttttccaagtctttcacattttgtacttttccacaaagttaacagttgccaaataccaaataattttatattttactatataatgtggagattaatgttgttcaactgtagagaggttcttttaattctggttatataagagtaataataagtacttacatagttcctactatgttccaggcacttttcatgtattaactcatttaatctcacgatggttctacaaggtaggttttattatcatgcccagtcttaagatgagggtctaaggccttatacagataacataaatcattttcccagagtcacatagccaggaagcagcatgcttagagtttaacccaggcagtctggctccagagactgaagccttaaccacatggatatcacggctgtccactagccatgaacctctcaatagccacgaggaaccagaaaacttgagagtttataattgtgacattaaaacatgaatggtataaccttacttgacttgcatgtctctcaggggaagctgttgctgagaaagactctgagattaccttcattaaaaaggtaacctgtactaacgctgagctggtaaaaggaagacagtacttaattatgggtaaagaagccctccagataaaatacaatttcagtttcaggtaagtcaccaatatttttcagtcactgatcttccctccaaaactgagtataatttattcttaaatacactacgtgtttcttatggccctgctcttaaccaacaaaccattttgaactaaataatattaatgtcaagcaaagaatgatttaaaaccatcgtggcagctgaggacttagctgcctgattaaccatctgagtgtctggacctgatgatgaatctgaaagtactcaccggacctcccctaaccaccacaccagctcccttgatagttctcagactgtttgtaaagaggaaaatgtgtaaatatgtattgtattatctgcttttagaaactagtcattgaaatagatgtactttctgcctttaatatgggagccccaggcagctttacaattccttaagggtttgtgaaccctccccaggagaggccggtacagaagagtttggcggacagcctgacccctggggacctgaccacagctgggctcttataaaataaatcaggctgggcacggtggctcacacctgtaatcccagcactatgggaggccaagacgggcagatcacaaggtcaggagatcgagaccatcgtggctaacacggtgaaaccccgtctctactaaaaatacaaaaaaaatagccgggcgtggtggcaggcacctgtagtcccagctactcgggaggctgaggcaggagaatggcgtgaacccgagaggcagagcttgcagtgagctgagatcacgccactgcactccagcatgggcgactgagcaagactccgtctcaaaaaaaaataaagaaatcaaattcagcttttctgttttgtggccacctcacaaacactttgtttcttggtaggtacatctaccctttagattccttgacctggattgaatactggcctagagacacaacatgttcatcgtgtcaagcatttttagctaatttagatgaatttgccgaagatatctttttaaatggatgctaaaattcctgaagttcagctgcatacagtttgcacttatggactcctgttgttgaagttcgtttttttgttttcttctttttttaaacattcatagctggtcttatttgtaaagctcactttacttagaattagtggcacttgcttttattagagaatgatttcaaatgctgtaactttctgaaataacatggccttggagggcatgaagacagatactcctccaaggttattggacaccggaaacaataaattggaacacctcctcaaacctaccactcaggaatgtttgctggggccgaaagaacagtccattgaaagggagtattacaaaaacatggcctttgcttgaaagaaaataccaaggaacaggaaactgatcattaaagcctgagtttgctttcaaactgtgctaaaaagcctgttattttatgctagatcagcttcaaccacacaaagacaggcaaattgagagagatggagaaagtcagcagtagagaaccttaaccttgagcgggcttagcctcagagccctcagcgcactgagaaggtaggtgggtttgtccctgccccctccccgtccattgccctctccatacccctgaagggagaccctctactctctttccctcccttccggcacatgttcatttcccccaggaacctgctctcgccaacaattgctttactaaaagacaggccccagtgcagcaacctggtgaaaagaaactgagtggcggatcgggagacctttctccagccctaaccaggtctctctctgagcctcaatttgagctttataaaagaggatacataacagaagttaatttttaagtgacattttgcagcacttcagatcatattaaaaagctctcgcatatattctcatttaatgtctcaagcctctcacaagattcagaaattattatcattatcatccccatcttacagataagaaaattgagatttaggcctggcatggtggctcaagcctgtaatcccagcactttgggaggccaaggcgggcagatcacttgaggtcaggagttcgagaccagcctggccaacatagtgaaaccccatctctactaaaaatataaaaattagccaggctaatttagcaagcctgtaatcccaggtactcagtaggctgaggcaggaggatcacttgaacccaggaagtggacgttgcagtgagccgagatcatgccactgcattccagcctaggtgacagagtgagactccatctcaaaaaagaaaaaagaaaaagaaaagaaaattgaggttcagaaaagtaaagcagttttcccaacctagtaaggaaaagaattggaaatcaaaccccaagactctatctcagtttaaatacatctctgttccacatcactacatattgcttgttgggttgaattttctaacagtaaggcaggatatagtagaagtttcttagacacagattaaccagccccactgaactatcacaggaaacatgaagatgacctccggatgtaacggtaattaacagagactggaatgcatctccttttgaagagtctgctttttactagttaggtgaagctacacaaggccttgtagtgtgcctttgtaaataacactaagattttccacttccagggactaaggacttatttttctctaatgtcaaagctcacattgtaggcactcccttggcaaaaacaaccaatgtgtcatgttcaagatgcccacactccctgtcagcgaggggtgaggagaccttctccagagcaggcctctcggtgtctcctgtcacttccttgctgggaggagggaaccactggtgctgcttcgaaggcacaggagtctgactgccttttcctgagcactttggcaaatagggcaggccacagtggcctaattaacccacaatgcagctgtcaaatatcaaagaaggttttgtgaattagcctggcaccatttaaaatatctgccagctcctcttcagctaactcctatgcatttgaacatattttctcagtgaggcttttgtgaccctccaaaccaggctgggcccattacccaaccctgcacttctcctccaaggcacttgtgctcttgcaatgatttacttaatcagattgaattattagtttagcgtgaccacactgaaagctccacttaggtaaggtctgagtctgttctattcgccagtatctcctgtagttggcacaatgtcgggcacatcatagggactcaataagtgtttgtggattcccctacagtgtagagaatcagaagacccaagttctagtcttggctttggccctaattggcagtgatttgggacaagcctcttaatctctttgatagcctataaaataagggaattggacactctaatgtctcttttatctatagctaagaagatgttctataatcttatgatgtgaaacaggaaaaaccaaacggcatataagcatccaaatattgggcttatgtatttcattctttctttctctcttttttttttttttttttttttgagacacagttttgctcttgttgcccaggctggagtgcaatggcgcaatctcggctcactgcaacctccgcctcccgggttcaagcaattctcctgcctcagccttccaagtagctaggattacagacatgtgccaccacacccagctaattttttgtatttagtacagataggttttcgccatgttggtcaggctggtctcgaacgcctgacctcaggtgatctacctcccttggcctcccaaagtgccgggattacaggcgtgagccactatggccggcctgggcttacatattttgtctgtaagtatggagacagtgcagagaagtaagctggaagagctgccaaggctttctgtagaaggacactgggatttgggtaggtgggaggtacagggaaggcctttctggttaaggggcaacgcttaaggcaggtttccccaggggtaagcaagatgttcttaggtgatacgatgcacattgttcactttagtggctatatgtttattttaacatgtattttaaaaaagtaattagcacatcaaagccatgatgtaacattttcttccaaaataaatctattttccaagaagtaagtctatttaagaaaaagtattgagtaaataaaagtaagtttattcttagggcaaaaatcatgcagttggcatgcaaatgattgacgtttaagatactctgtcttaagaaaacacgtggaggtctgtgagccaaggttgaggcaagcagccttgctccatatttctcagtgagaaattctggaccaaagtcatgtttagtctttctttccagaccctatgatgctgatgtattcagcaacacccaacaaacatgtattgattggtgactgcaggctaggcccaattctaggtgcttggtaccaagatccctgccattgtggaacatagattccaactgggagagatatgtaataaaaaataaagagaataattaagcaattagtcttggatctcagaaagtgataagagcaatgggaaaaagaaaaagcagactaaaggagactggtaatggtcaggggaggggttgcagttctaaatagggtggccaggtcagggtgggcttcaatgagaaggtgaaatttgagcaaagacttgaaggatgtgaaagagtgagccacatagctagccaaggggagagtgttcctggcactcttggtacatagtgtccggcctaaggcaggagca

SEQ ID NO: 104 - RNA, 5480 nt, Homo sapiens
  source 1..5480: mol_type = mRNA
tatatccgtggtttcctgctacctccaaccatgggccttttgggaatactttgttttttaatcttcctggggaaaacctggggacaggagcaaacatatgtcatttcagcaccaaaaatattccgtgttggagcatctgaaaatattgtgattcaagtttatggatacactgaagcatttgatgcaacaatctctattaaaagttatcctgataaaaaatttagttactcctcaggccatgttcatttatcctcagagaataaattccaaaactctgcaatcttaacaatacaaccaaaacaattgcctggaggacaaaacccagtttcttatgtgtatttggaagttgtatcaaagcatttttcaaaatcaaaaagaatgccaataacctatgacaatggatttctcttcattcatacagacaaacctgtttatactccagaccagtcagtaaaagttagagtttattcgttgaatgacgacttgaagccagccaaaagagaaactgtcttaactttcatagatcctgaaggatcagaagttgacatggtagaagaaattgatcatattggaattatctcttttcctgacttcaagattccgtctaatcctagatatggtatgtggacgatcaaggctaaatataaagaggacttttcaacaactggaaccgcatattttgaagttaaagaatatgtcttgccacatttttctgtctcaatcgagccagaatataatttcattggttacaagaactttaagaattttgaaattactataaaagcaagatatttttataataaagtagtcactgaggctgacgtttatatcacatttggaataagagaagacttaaaagatgatcaaaaagaaatgatgcaaacagcaatgcaaaacacaatgttgataaatggaattgctcaagtcacatttgattctgaaacagcagtcaaagaactgtcatactacagtttagaagatttaaacaacaagtacctttatattgctgtaacagtcatagagtctacaggtggattttctgaagaggcagaaatacctggcatcaaatatgtcctctctccctacaaactgaatttggttgctactcctcttttcctgaagcctgggattccatatcccatcaaggtgcaggttaaagattcgcttgaccagttggtaggaggagtcccagtaacactgaatgcacaaacaattgatgtaaaccaagagacatctgacttggatccaagcaaaagtgtaacacgtgttgatgatggagtagcttcctttgtgcttaatctcccatctggagtgacggtgctggagtttaatgtcaaaactgatgctccagatcttccagaagaaaatcaggccagggaaggttaccgagcaatagcatactcatctctcagccaaagttacctttatattgattggactgataaccataaggctttgctagtgggagaacatctgaatattattgttacccccaaaagcccatatattgacaaaataactcactataattacttgattttatccaagggcaaaattatccactttggcacgagggagaaattttcagatgcatcttatcaaagtataaacattccagtaacacagaacatggttccttcatcccgacttctggtctattacatcgtcacaggagaacagacagcagaattagtgtctgattcagtctggttaaatattgaagaaaaatgtggcaaccagctccaggttcatctgtctcctgatgcagatgcatattctccaggccaaactgtgtctcttaatatggcaactggaatggattcctgggtggcattagcagcagtggacagtgctgtgtatggagtccaaagaggagccaaaaagcccttggaaagagtatttcaattcttagagaagagtgatctgggctgtggggcaggtggtggcctcaacaatgccaatgtgttccacctagctggacttaccttcctcactaatgcaaatgcagatgactcccaagaaaatgatgaaccttgtaaagaaattctcaggccaagaagaacgctgcaaaagaagatagaagaaatagctgctaaatataaacattcagtagtgaagaaatgttgttacgatggagcctgcgttaataatgatgaaacctgtgagcagcgagctgcacggattagtttagggccaagatgcatcaaagctttcactgaatgttgtgtcgtcgcaagccagctccgtgctaatatctctcataaagacatgcaattgggaaggctacacatgaagaccctgttaccagtaagcaagccagaaattcggagttattttccagaaagctggttgtgggaagttcatcttgttcccagaagaaaacagttgcagtttgccctacctgattctctaaccacctgggaaattcaaggcgttggcatttcaaacactggtatatgtgttgctgatactgtcaaggcaaaggtgttcaaagatgtcttcctggaaatgaatataccatattctgttgtacgaggagaacagatccaattgaaaggaactgtttacaactataggacttctgggatgcagttctgtgttaaaatgtctgctgtggagggaatctgcacttcggaaagcccagtcattgatcatcagggcacaaagtcctccaaatgtgtgcgccagaaagtagagggctcctccagtcacttggtgacattcactgtgcttcctctggaaattggccttcacaacatcaatttttcactggagacttggtttggaaaagaaatcttagtaaaaacattacgagtggtgccagaaggtgtcaaaagggaaagctattctggtgttactttggatcctaggggtatttatggtaccattagcagacgaaaggagttcccatacaggatacccttagatttggtccccaaaacagaaatcaaaaggattttgagtgtaaaaggactgcttgtaggtgagatcttgtctgcagttctaagtcaggaaggcatcaatatcctaacccacctccccaaagggagtgcagaggcggagctgatgagcgttgtcccagtattctatgtttttcactacctggaaacaggaaatcattggaacatttttcattctgacccattaattgaaaagcagaaactgaagaaaaaattaaaagaagggatgttgagcattatgtcctacagaaatgctgactactcttacagtgtgtggaagggtggaagtgctagcacttggttaacagcttttgctttaagagtacttggacaagtaaataaatacgtagagcagaaccaaaattcaatttgtaattctttattgtggctagttgagaattatcaattagataatggatctttcaaggaaaattcacagtatcaaccaataaaattacagggtaccttgcctgttgaagcccgagagaacagcttatatcttacagcctttactgtgattggaattagaaaggctttcgatatatgccccctggtgaaaatcgacacagctctaattaaagctgacaactttctgcttgaaaatacactgccagcccagagcacctttacattggccatttctgcgtatgctctttccctgggagataaaactcacccacagtttcgttcaattgtttcagctttgaagagagaagctttggttaaaggtaatccacccatttatcgtttttggaaagacaatcttcagcataaagacagctctgtacctaacactggtacggcacgtatggtagaaacaactgcctatgctttactcaccagtctgaacttgaaagatataaattatgttaacccagtcatcaaatggctatcagaagagcagaggtatggaggtggcttttattcaacccaggacacaatcaatgccattgagggcctgacggaatattcactcctggttaaacaactccgcttgagtatggacatcgatgtttcttacaagcataaaggtgccttacataattataaaatgacagacaagaatttccttgggaggccagtagaggtgcttctcaatgatgacctcattgtcagtacaggatttggcagtggcttggctacagtacatgtaacaactgtagttcacaaaaccagtacctctgaggaagtttgcagcttttatttgaaaatcgatactcaggatattgaagcatcccactacagaggctacggaaactctgattacaaacgcatagtagcatgtgccagctacaagcccagcagggaagaatcatcatctggatcctctcatgcggtgatggacatctccttgcctactggaatcagtgcaaatgaagaagacttaaaagcccttgtggaaggggtggatcaactattcactgattaccaaatcaaagatggacatgttattctgcaactgaattcgattccctccagtgatttcctttgtgtacgattccggatatttgaactctttgaagttgggtttctcagtcctgccactttcacagtgtacgaataccacagaccagataaacagtgtaccatgttttatagcacttccaatatcaaaattcagaaagtctgtgaaggagccgcgtgcaagtgtgtagaagctgattgtgggcaaatgcaggaagaattggatctgacaatctctgcagagacaagaaaacaaacagcatgtaaaccagagattgcatatgcttataaagttagcatcacatccatcactgtagaaaatgtttttgtcaagtacaaggcaacccttctggatatctacaaaactggggaagctgttgctgagaaagactctgagattaccttcattaaaaaggtaacctgtactaacgctgagctggtaaaaggaagacagtacttaattatgggtaaagaagccctccagataaaatacaatttcagtttcaggtacatctaccctttagattccttgacctggattgaatactggcctagagacacaacatgttcatcgtgtcaagcatttttagctaatttagatgaatttgccgaagatatctttttaaatggatgctaaaattcctgaagttcagctgcatacagtttgcacttatggactcctgttgttgaagttcgtttttttgttttcttctttttttaaacattcatagctggtcttatttgtaaagctcactttacttagaattagtggcacttgcttttattagagaatgatttcaaatgctgtaactttctgaaataacatggccttggagggcatgaagacagatactcctccaaggttattggacaccggaaacaataaattggaacacctcctcaaacctaccactcaggaatgtttgctggggccgaaagaacagtccattgaaagggagtattacaaaaacatggcctttgcttgaaagaaaataccaaggaacaggaaactgatcattaaagcctgagtttgctttcaaaaaaaaaaaaaaaaaa

SEQ ID NO: 105 - DNA, 49201 bp, Homo sapiens
  source 1..49201: mol_type = genomic DNA
gctcagcgcagccactgcctactgggctcacacgctcctccggcctcagcctctcgagtacctgggactacaagcgtgagccagtttggctaattttggctaatttttgtagaaacggggtctcgccatgttggccaggctggtctccaactcctggactcaagggatccaccttcctccccctctcaaagttctgggattaccggagtgagccactgtgccctgctggcaaatttcttaaactgtctgtgcctcagtgacctcatttaataaagggaataattgtagcacactttttctagagctgtgaagattcaatggaataaataaggcaataaatgaatggatggggaatgaaggatgtgggtttcctccctcttgtctttcaataagctctcaccatcaacctcccattgcctgttctctctcttccccctctctccctctgtctctctctcagccaggaaacctggggtagggaggcttggagccagcgggtgcgtcgggaggctgcgggtactgactcgggccgcgcacggagattgcgggagaaggatccacaccgcggaagaaggatcagggtggagcctgtggctgctgcaggaggaggaacccgccgcctggcccacaccacaggagaagggcggagccagatggcaccctgcccaccgcttcccgcccacgcactttagcctgcagcggggcggagcgtgaaaaatagctcgtgcgcctcggccgactctgcagtgcgacgggcggagcttccagacgctccgccccacgtcgcatgcgccccgggaacgcgtggggcggagcttccggaggccccgccctgctgccgaccctgtggagcggagggtgaagcctccggatgccagtccctcatcgctggcccggtcgcgctgtggcgaagggggcggagcctgcacccgccccgccccccctcgccccgtccgccccgcgccgcgcggggaggaggaggaggagccgcggcggggcccgcactgcagcgccagcgtccgagcgggcggccgagctcccggagcggcctggccccgagccccgagcgggcgtcgctcagcagcaggtcgcggccgcagccccatccagccccgcgcccgccatgccgtccgcgggccccgcctgagctgcggcctccgcgcgcgggcgggcctggggacggcggggccatgcgcgcgctgccctaacgatgccgcccgccgcgcccgcccgcctggcgctggccctgggcctgggcctgtggctcggggcgctggcggggggccccgggcgcggctgcgggccctgcgagcccccctgcctctgcggcccagcgcccggcgccgcctgccgcgtcaactgctcgggccgcgggctgcggacgctcggtcccgcgctgcgcatccccgcggacgccacagcgctgtgagtagcgggcccagcggcacccgggagaggccgcgggacgggcgggcgtgggcgcgttccctggcccgggacgggaagcaggacgcgggccaggacgctcccagggcgaggctccggcgcggcacggcggccctgctaaataaggaacgcctggagccgcggttggcacggccccggggagccgaaaaaccccgggtctggagacagacgtcccacccgggggctctgcagacgccagcgggggcggggcgcggaggccgcgctcagctgggaggacaaacagtcgctaattggagaggaattgggatgcggcctggggctgcggggtacccggagaggtggggatggctgtagggggcggcagggaagagttccaggaggtgtctggaaaaggatttgatggatgtgcaagaattgggctgatgcttaggaaggggcgatgaggtgggtccagaagaaggggggtgaacggtgtgagcaaagaccgtgaggctggaggctggccacgggaggtgtgaggggtaggggcagggtgggaggtgggctcgcgggtgggctggggtcatgaagggcctcaggcgctctgctattgggttccaaggctatcctgagaacaggggtgaggggggattgccgtggggggttaaagccttgtcatgttcgctttcgggagataaaaacaacaggtggcctttatggagacgctgcccagagccaggtctgtgccaggctcctgttgggggtcgtcatgcggaatcctgactctgaccatccgaggcatagggaccgtggagatttgcatttcacagatgaggaaacaggtttggagaggtgacacgacctgtcccaggcatcacagccgggatgtgcatagcaggggtttggaactatgaggtgcccaggacccagggttggattgaaaagggcggaggggactaagataagcagacagttgtccccagcgctggggagagtcttgggaccagtctgatgccttgtatttcccaggctccaggctcctcgccgggacagtgtctccttgggtgcgtgctggatccctgggggacgtggcacatccccaggcttgctaaacattgggtgggttctggcatttggttttgtaacgtttctgggtcactcccgcctgtggccacccttccttaggggagccgtgtgtccttggggctttgctgggtggtctcgagggtgggagaagaatgggttctcctggaccaatggagcccgtgcccctcggggccacattgctcctgcgctccctgactgcggacgcgtgtgtctcgcggctgtctctgtggagatggcctcctcctgcctggcaacagcacccacagaattgcatcagacctaccccacccgttgtttgtgatgctgtagctgagggctcctctgtctgccaggccggtcactggggactctgtccagggcctggtggttcctgcttcccagcacctgatggtgtccatgagagcagcccctcaggagctgtccgggagagaagggcgctggtggctgctgagcggagagcaaggcccgtgttctccaggcccttggcacagcagtggagcccccgcccctgccttgtgttgtcctcttaggctctggtcctggggtttggaggagggggaccctgggagttggtggcctgtcccagcctgagctggcaagattccgaatgccaggccccccaagtgtgcaacagggcacagggtgacctcatgtgggcaggtgggtgctgttctgtacacacctggggccgccgctgggagagttctggaaggtggggtgaggggacccatggcaaactagggccttaggaaggatgtgaaggccctggctggccccccaggccaccctctgtgctgtggggcagcccagccattttgctgtctaccctgcaaactcctcctcggggagacggctgggttttccccagggaagaggggtcaagctgggagaggtgaaggacacagatcacagctgctggcaggtgttcaagggtccaagagcgttgctgtctgggtgtcaccagtagccttcctggggggctcacgcaggtgcctctccacttgtggctccctggctgctgaagctcagcagggacagctgtgtccagttccaggtggaggacagccggggcttctgaggccacagcctgccttgggttaatgatgctgccgagaggtggtggcttttggaaaagatggcgtactgcaaaacgtgctgctctgcgtggctcgaagcttcgtggggagacgtgggcagagccgtggctgactcacagaccccccaccccagagcctgccctgccctccctgccccgacccttctccctcctgacccatgtgttttttttttttttttttttttttgagacagagttcactcttgttgccaaggctggagtgcaatggcacgatctcggctcatggcaacctccgcctcctgggttcaagcgctttttcctgcctcagcctcccgagtagctgggattacaggcgtgcaccaccatgcctggctaattttgtatttttagtagagacagggtttctccatattggtcaggctggtcttgaactcctgacctcagatgatccgcccgcctcggcctcccaaagtgctgggattacaggcatgagccaccacgcccagccctgacccatgttttgaaccaaattccagccacccttttatctgcaagcattttggagggcatcgcaatactgcagacccacctaacacaacagacagttccttcatgccaccgaaggcctggtgtgttcacatttttggtttaatagtttgaattaagagccaaataaggtccacacactgcaattagttgatgtctttttttttttctttttttttttttttttgagacggagtcttgctcttgtctccaggccgcagtgcagtggcatgatctcagctcaccgcaacctccgactccctggttcaagcgattctcctgcctcagcctcccgagtacctggtagctgggtttacaggcatgcaccaccgtgcccagctaatttttgtatttttagtagagacggggttttactgtgttggccaggatggtctcgatctcctgacctcgtgatctgcccacctcggcctcccaaagtgctgggattacaggcgtgagccaccgcacccggccaatgtcttttaaaaatatatactttttttttttttttgagacggagtttcgctcttgttgcccaggctggagtgcagtggcgcgatctcacctcacggcaacctccgcctcccgggttcaagtgattctcctgcctcagcctctccagtagctgggattacaggcatgtgccaccatgcctggctaattttgtatttttaggagagacggggtttctccacgttggtcaggctggtctcaaactcctgacctcaggtgatccgcctgccttggcctcccaaagtgttgggattacaggtgtgagccaacgcgcccagacaaaaatatatgtgtgtctttaaggctggtcaagcaaagcagtaggactggagaaagaatgaagaattctacctggctgtgatcaattcgttgtgaacaccactgtgcttggaccagctagctgatgtcttttgttttgttttgtttgagacggagtctggctctgtcacccaggctggaggacaatggtgtgatctcggctcactgcagcctccatctcccgggttcaagcgattctcctgcctcagcctcctgagtagctgggattagaggcgcgcgccaccacgcccggctaatttttaaaaatatttttagtagagatggggtttcaccatgttggtcaggctggtcttgaactcttggccttaggtgatctgcttgcctcggcctcccaaagtgctgggattacaggtgtgagtgatgtattttatttatttatttatttatttatttttattatttgagatggagtctcactctgttgcccaggctggagtgcagcagtgccatctcagctcactgcaagctccgcctcctgggttcacgccattctcctgcctcagcctcctgagtagcctggactggtgcccgccaccatgcccagctaattttttgtatttttagtagagacggggtttcaccgtgttagccaggatggtctggatctcctgacctcgtgatcctcccgcctcagcctcccaaagtgctgggattacaggcttgagccaccgcctgtcttttaaatgtccgatgatgtctaggagcttcccttcctctctttttccttgtgcaatttgttgaagaaactggctcctgcagcctggatttctcgctgtgtcttgggggtgccacctccatggtgtcacctccgtggtgctgtgagtgtgtgctttgtgtttcttgtaaattggtcgttggagccgacatcccattgtcccagaggttgtcctggctggcactggcctaggtgtagatgtcatcagctcagggccccctgctctaaaggccacttctggtgctggttgccactcaccctggctgggggtcacctgggtctgctgctgtctcgcaaatgctggggtccaggactgggcacatcgagggacttggtaggtgcttggttcactgatgtaaaatataggagcacccggggccttgccctttcccacctgcatccctgaatgacaggagagtgtgggagagtgtagggacagcaggcgcagaccccggggcccctgcctgggattggcgtcggggaagacaggcattctggagcgacccctaggcctgatgccttagagcgcaactgccagagacacagcttccttggggggctggccaggccacggaggggcccctggctcccatttctggtccctggatcctgagagcgaggactagggattgtcaccaaggcctccatgagccctcagcagaaggagggccaccctcgagggctccgttatcactggagcccgcgttcaaccaacacgcagatgattctccaaggacagagatggatgatggggagggggctggcctggaaggacccccagtgcaggtgacattgaagccaggtttcaaagctcccacagggagctgcccagagagagtccccaaggggcaaggtgactcgggggcaggggtagggcctctgtcaggagagcctaggagaggcctgtgtcttctaggaagagccctggcagccgagcggaggcagtggtgaggacctgcatcctgcatgtccagctggcctcacccggggtccctgagccgggtcttacgtggctcccgcactcgggcgttcagaacgtgcctgcgtgagaaacggtagtttctttattagacgcggatgcaaactcgccaaacttgtggacaaaaatgtggacaagaagtcacacgctcactcctgtacgcgattgccggcaggggtgggggaagggatggggaggctttggttgtgtctgcagcagttgggaatgtggggcacccgagctcccactgcagaggcgactgtggagacagagagcacctgcaggtcatccatgcagtatcggcttgcatccagatcatacagggaacactatgattcaacaacagacagggaccccgtttaaacatggacaaggggtcactcacgcctggaatcccagcagtttgggaggccagggtgggtggatcgcttgagcccaggagtttgacaccagcctgggcaacagggtgagaccccggtctctaaaaaataaaagaacattggccgggcgtggtggtatgcatctgtggtcccagctattcaggagactgaggtgggacatcacttgagccgaggaggtcaaggctgcagtgagctgtgatcacaccactgcactccaggctgggtcacagagcaagaccctgtctcaaaaaaaaaaaaaaaaaaaaaaaaaaatcacaggatctgaacagagatttctccaaagaagacgcacagatggccaacagcgtgtgagaagatggtcggcctcattagtcatgagggaaacgtaaatcaaaaccactgtccagccgggcgcggtgcctcacgcctgtaatcccagcactttaggagagcagatggcttgaggccaggagtttgaggccagcctgggcaacatagcgagaccaataaatagatattagtggtggcgcctgtagtcccagctagttgggaggctgaggggggaggattccctgagtctatgaggttgagactgcagttagctgtgatggtgccactgcactccagcctgggcgactaggaaacggtctttaaaaaaaaaaaaaaaaaacagggtgggcgcggtggttcacgcctgtaatctcagcactttgggaggccaaggtggggggatcacaaggtcaggagtttgtgaccagcctgaccaacatggtgaaaccccgttctactaaaaatacaaaaattagcgaggtgtggtcgtgggcgcctgtaatcccagctaattaggaggctgaggcaggagaatcacttgaacccgggaggcggaggttgcagtgagccaatatcacaccactgcactctagcctggtcaacagagcgagactctgtctcaaaaaaaaaaaatgctgagcgtggtggcgcatgcctgtagtctcagctactttgggggctgaggcaggagaatcgcttgaacctgggaggcagaggtcgcagtgaggcaagattgcaccattgcactccagcctgggagacagagtgaaactctgtctcaaaaagaaaaggtctaggaagagtccgcaccctctccccgcggtggccacgccgggctccgcgctgagccctctgtgttcttgtctctccatacctcatcacggcaccgcagggttgcagccactcctggtctcattttacacaccaggaaattgaggctctttgagaagccgtggtgatgatttcatcagcatgctctggggcagacccctgcagccgcacagggtgcctggggcccacactagtgccctggtttatagacagacagaggtggcagtggcgcttccgagtcgggctgcgatgtgcttgcactccccgaggggctgaggggccctgcgcccaggtgcagctgcttgggtgctgccagcccctcccacctctccctccctgccagcccctcccacctctccctccctgccagcccctcccacctctccctccctgccagcccctcccacctctccctccctgccagcccctcccacctctccctccctgccagcccctcccacctctccctccctgccagcccctcccacctctccctccctgccagcccctcccacctctccctccctgccagcccctcccacctctccctccctgccagcccctcccacctctccctccctccagcccctcccacctctccctccctgccagcccctcccacctctccctccctgccagcccctcccacctctccctccctgccagcccctcccacctctccctccctgccagcccctcccacctctccctccctgccagcccctcccacctctccctccctgccagcccctcccacctctccctccctggctcatccctgctgtgtcccttctctctagtttcctgttcagtttcaggaaggaggctgggaacccagatgtagggaatttgcgccctggagtcagacctgggttcacgtcccagcgcctccacctctggtgtgaccttggtccagtctctcagcctcagtttcctcacctgtaaagtgggctccatgattagatgcaccctgcagggcagtgtagcagtgacctggctcagccactggcagccccaacaatcataccttgttaaagtagctctgtcggttccctcaggggttccgggggcccattcccctgtcctccatgcactgtgagacctgccctgccacagagcagagtgtaacagcctgagggtgagagccagacactgtgcctgtgcttagaccagacactggacgacgggagccagtgcagcctgggcgggtggactcctatggacccctcagcacccagcctcggtgccttcagcgcagggccgcgtggctgtgggggctcacaagacccggcccactcctgcttgtgcctacatctgggtgtttgcccattggtgccttttgacgcgttctggtgtgtgtgagacgtgcggggctgggaagtgttggcagagccgcgagtaccgtcctcactccttttgttcttttgacgtaagctggcgagtggcactgcctgagttccgctcagtgcccgccctgatgtgcggaccccgctgcattcttgctgttaggtggtggcggtgtgcgctgtcgctggtgggcaccgagagtctttgggagctttggggaggttgtgccaagcctgagcctcgacgtcccccttcccggctttctgttggctcttctgaggccagggcatctctatgagggcctcctgctggagccgtctctgtggatctcctctgccatcctggcccatgagtgggtgatgcgctggccaccatctggtgacagtggccgggcaccgctgccaaatgtgggtcccgcatctgcaagcccctccctgggtcccctagggtatggggtggttctgccactgccctcgctcccccaccttggggtgcctctccccctgctcgtgggggagaccctgcctgggatctgctttccagcaaggaatatactttggagggagacacacatgttcttttctggagctctgcagtggccacggcagcccagcccgccaagcaccctggaatgaaaacatcccgctgctgtctgggcctggcctgcactctgctgcctgcgctccagctggctgaggccgggcacgtctgcgggcacagcagcgggggcgccacagtctccctgcagagtgagcgcagctggaaaatgcagctcacgccctttcccagaacacctcgctcttcatggcttggcagctgtccttgcctaggggccagggtgcccaggcactggtggcaggagaagggctacatctggggctgaggcgggctgggtccttttctccctgcagctcccgaggcccagccctggcccagcctggcattcctgaccttagcagcgccatgatctgaagacaggctggcttctgtgaggccacctcagaaagggctttgtgcccaggcagaggcggaagccagctcttccttctggttgaggcaggaatgaggccagcgctggggcaagcccatgcccagggaacgtcacagctgtgggagtacaggggctccgggttctgagcccgtccactgtgcatcgtggccctggcctcaggatggctcgtaccatcattggctgtgcccacagccgagtgggtgatgggattccggctgccccgctggatctgtgctgctgccctctccagggcactgctgtgcccgcacagccgggcgcagatggccagtttgcttgcccccccccccaccatcctcttcctaccttggcttcctccattgacacactggaccctgctggctgcccggggaggtgtttgggggatggtgttgggggaggaggagggccccttgagcctcagtgtgcccatcaggagcgtaaggtcagtgcagcacctgcccacacaggctgtgaagggtgggagtggagagggatgcaagggggtcacaacgcctggctccatgtcagctgcgtgcaggggcaccaggagccggccctcattctccccttgaactggaagggtggccccgaccccagcggcaggtagcatacgtatgaagcgctctccttcctacaccccacaggtgggctcgtctccagacggccctttttgagctggctgtgtttttccatctgtgtaggcaaggacatcgcagactcccctttctcatctccctcgttcagcctccgaggccggagtctccatccctgtgcctgcctgtgggtcccgggaggacctgaggctgcccatgtcacccccggcatctcatcctggggacagttcagccgtgggagggatctgtaaggacagaatgccgctgagcctggggctccccagctagtctcacaccccgtgtctgggacccagagaccctcgtgcagggctctgttgcttggggcctggcagcctcgtcctgtatcagaggctgccacccccacccctcgtggggccagggttgtggccggcctccctggccctccccatggaagtggtaggcggagccagcagccatctgcccagcccggggctgcactgttttttttcaaatgagcaccgtcccaaactgcagcccgttaatttaaacaggatcatttccggccctggaagccgcctcactctccttaaatagaaaggagcacagcgcagagggaaacagatgaggtcatggctcggctggcccagcgaggaaggggccgcagtgggggtggcactgccgcctgtcccctgtcctctccagcgcccacactgcagcccatttcctcaccctgggcctgctctcgggagggacgggcctgggggtcctcttgctgggcggaggggaaccagctcctccaggagaggacggggcctggcagggggcatggggcctccctgggtctggcgtcctgtcctgcccctgccgagggaggagcggttacataagctccgcaggcggcccctccgagccggtccccccagcccagtttccagtgaggcggccagcgcgggcgggggtgccgggcctggcgcacacccgctgctgaccacacgtgtctggaatgtgcagatgtttctttgggggctccgtccggcccccagaccccactcagcatctggtctggggagtgggcgcctggggcactcagctctgagtgtgagactctgaggcaggtctggtttgtctggggccattccctctgctgtggattgggagggccccgggagctgccccacacccagggaagttctcctcagtcccactgttgcattccccgaccccggctcccccggcccaggagcgcctgtggggcagaaggcccagccccaagacttcccggccctgccagcctcaggcttcacccaccctcgcgccaactgtgggcagagcccagggggagggcaggagagccagcgcctggctgggaacacccctgaggggccgaggctccagggcgagggggcccgacctggggttcacacgcccgggtggcgggcagacccgctgcagcatgagacacgtgtcagctacctcgggccggcaggctggccctgctgcccacagccctgggacgtggccccacctgtgacgggtgtggaggggcagcctccaggcctggccacaccctctgctgttgctgctcctgctccaggattggcaagggtgctgggaaggggtgaagacccgtactgtggccacacacctgggacttccttctccacccagtggtgccccagcagccgctaaggagcccgctgggtcccacgctaggatggtcctaactcctcccgccttccagatcggacgctcggcgctggggaccccttgtgtcccggggctggggcaccgtcctgccccccatgggggtgtactcctcccgacaagcttggcttcagcttccctgggagcacatcctggccctcgggcacccatcaggctgtccctgtgcacctggctcccacccttccagctcatagcaggaactggggtgaggagtgcgtggggcagcaagggcctgggaccccagaggaccctgcactctgctctgtgctcttgcctgggcttagggccgctcggtggtcctgctgccagatgcctgggccctgctgtgtcccccatccttgcagggaaccagaacgtgggggcagggcatcagacagcggcgatgatgtcacctggcgggtgcagaggaagcccgaggggcggggtgggggggctggcgcgaggctgcctggctaggccttggcgttcccccagaacggcgatggcaaaagcagatggagacgtgaaaaagtacgggagcaagcgaggtgaggactccacggggacccctgtgctgttccctgtccctgaagcccacacctgagtcctgcccagggcagatgcttccacacccagggggcacctgagtcctacccagggcagacgcttccacaccctgggggctgggggactgcacctggctcctgtctgggccccagcttcattccactgccctgggccctgggagctcggccgagcggggtccccaagaccttgctgcatttctgggccttgggctggggtgagggccgggagaaggagccagcctggagcctggcacgcagggagtgcatggccagaaccggtgacaggcagggctgcctgctggcgtggaagaagtgtccatggcacccccaggcctggttcacagtgggatgggcggggagccggggggctctggggtcctcggctgacctgcccccacccctgccctggcttgtcagctcccagcagcagccactcttgatggattttccagaaaatgaggtgtggccaaacatcttcaggcttttccttctttcctttctcccgtggcctgggtgggagctgctccccatgcctgggggcaggtgcgagagcctgtgcccctccctggggcagtttcacagctgtgtcccttccagggggcctgcctgtgttcaccgtggcctctgcagcacctctcgccccttagggctcctgcgcctcgggtcccggtgcctcatttctccctaaagcattggttctgctgccgccgcagccgctggaaagtccctcctcaggtctaactgcagttcctcacggcacagtgttccccctcgggcatggtgcttgggcagtgggtgtgagtccagctgcctcaccctgtctcgagaatggcctcttgctggtctcccagccaccaccctgtcccaccccacggcggggatggtgtggatgcctagcagcgcggctgtgggcccacccatccttatgggcagtggggagcacctcagcccgtgtccctaccttggtgtagaggaggggacggcagagaagcagggttcagttaggggggaagtggtggccctgccggaggggccgttccctgtgtgcctggcccccagatcctctcccctcccggagcccagggcacaggcataggctctctgagtgtcccacagcccctgggggaagggaactgcacccccaaccgtgccctccatccgcagatggaacgagaagctccgggagccagtgcccagcgtctcatctgtctgggcacccagcccaggtgagggcctggctccaccgtccgtggctggtgctgcttcctggcacggagaaggcctcggctgctctgtcccctcagctggggtggcctctggtccccttctttgttggttcccttctcaagctcttgccctggccccgggccccaccgggcagcctgtgtgtgcgtctctcctgcgccgggtaggctcctgtgggagcggagctccggtgggaggagcagggctggaggctggcaggggctgggcgggtgttcagggatggaggccgccccggcttggggctggctgccgggtggtcattgctgggaagagcaagtctaggcggaggcacctgctgggtcactcgtggggagggtgacacctggggaagtagaggcccgtggcaggaggtgaggcctcggggtcctggggagcaggggggtggtgtgcagacctgcggagccatagtcctgtgccaggagcactactgggagtgcgtgggaccaggaggggtgcccagggtgggcggcagagtgacccccgaggtgcttgaggccgaggggaggtggagttctcggtttgccccagctctctgtctactcacctccgcatcaccagctccaggacctggtttgtaactcgggcagctctgaaaagagagacatgctgccgccctgtggtttctgttgctttttcttcactgactactgacatgggatgtttttcctacggctgtgaccaattgtgcttcttctaattgcctggtttttctttttttgtttttggagttttctctttctttcctccctccctctcaccctccatcctttttttttttatttttattttttgagatggagcttcactcttgcaggatggggtgctggagtgcaggggtgcgatctcagctcactgcaacctctgcctcgcgggttcaagtgattctcctgcctaagcctcctgagtagctggaattacaggtgcttgccaccacgcccgactaattctgtagttttggtagagacagggtgtctccgtgttggtcggtctggtcttgaactcctgacctcaggtgatgcgcccgcctcagcctcccaaagtgctgggattacaggcaggagccattgcacccggctctttccccttctccttttcttctctctctcctccctttctttcttttcttttcttttttttttcttttgagatggagtctcgctctgtcaccaggctggattgcagtggcgtgatcttggctcactgcaaccttcgcctcccgggttcacgtgattctcctgcctcagcctcctgagtggctggcactacaggctcccgccgccatgcccggctaatttttgcatttttagtagagacagggtttcaccctgttggccaggatggtctcgatctcttgatctcatgatccacccaccttggcctcccaaagttctggcattacaggagtgagccaccgtgcccggccatctttctttccttgctttctctttgttttctttcgagaccgggtcttgctctgtcgcccaggctggactgcagtggcacaatcatagctcactgcagcctcgacttccctggctcaagcgatccttcctcctcagccccccgagtagctggaactacagttacacactaccatgcctggctgattctttttttccttgtagagatggggtcttgctatgctgtccatcctggtctcaaactcctggccttcccaaagcactgggtttacaggcataagccaccacacccagtttccttttcttctttttaactggaatagttgacgttttctttattagctgtgtgtcaggagggtatttttggcctttagtatgtcgtgtaagttgctagtgcttttctgagattgtagtttgttttctaattttatttatattttgcgtagaagttgtgtattttagatggagttaggtcggctggtctttgatgttttatttattaattatgtatgtatttatttatttttgaggtagagtctcgccgtttcacccaggctggagtacagtgatgcgatctcagctccctgtagccttgacctctctgggctcaagtgatttttctctcctctacctcccgagtacttgggaccccaggcgcatgccgccatgcctggctaatgtgtattttttgtagatacggggtctcactgtgttgcccagggtggtttcaaaatcctgggcccaggcgatccttccgtctcagctcccacggtgctgtgttaccggcgtgtgccccagtgcctggccgtcttggaggtcttgtttctctgggtttatgcctcgaggtggcgcctgctcccctgtgctccctggtagcctggtagtgagcctgcttctcacacagtcatacctggttgtggtcccacagtgggaccaccctgttgggttcagaacaggagatgggggcccctcgagtctgtgtgggggctgtggacagggttgggagaccttggctctgtgggggactgtggacaggggatggggggccttggccctgcgtgggatgggttgggggtccgtgcccttcctggccctgggtggacaggtccatgtggcactcggcatagggctgagatgggtgcagagggctgaggcccccaggcctctcctggcttggtttccccagatgagtgttcatttgggtcttccatcagaaagtcccctcctgacctctgggagtggggagctcaagggtgggaggccatagcttggggatgctggcaatgtgtgggatgggcccagggatggcctctggcctactaggggctctggccctgacccacggccactcactcctcagagacgtctcccacaacctgctccgggcgctggacgttgggctcctggcgaacctctcggcgctggcagagctgtgagtgtcccccagtcgtgccagcatgcggggctcactccgggtgggctggcggcaccgcctcttgctgctcagctgtgggggcttccatcagctttgccgaatcccccgtctcttccagggatataagcaacaacaagatttctacgttagaagaaggaatatttgctaatttatttaatttaagtgaaatgtaagttgtggttctttgggtggggtcctggctggaccccaggcccccaatatcccttctgccctcccagttggtccgtgtccccttccaggcttgagaccagatcctgggggcagttcactgcctgcttggagccccccagtgccggcttggttggggcaggggaggcggtgctgtcagggtggctccagggcctggttgccagtggggggctggcatagacccttcccaccagacctggtccccaacacctgcccctgccctgcagaaacctgagtgggaacccgtttgagtgtgactgtggcctggcgtggctgccgcgatgggcggaggagcagcaggtgcgggtggtgcagcccgaggcagccacgtgtgctgggcctggctccctggctggccagcctctgcttggcatccccttgctggacagtggctgtggtgagtgccggtgggtggggccagctctgtccttcccagccaggtgggacctgggccctgcagacactgggcagggctcaggaaggcctctctggggggggcctccgggccaagggaacagcatgggagcctgtgagtgcggcgggcggatgtgggggcgtggggtggagccaggaggagcagaacccggggtccagtggctgcctcttctaggtgaggagtatgtcgcctgcctccctgacaacagctcaggcaccgtggcagcagtgtccttttcagctgcccacgaaggcctgcttcagccagaggcctgcagcgccttctgcttctccaccggccagggcctcgcagccctctcggagcagggctggtgcctgtgtggggcggcccagccctccagtgcctcctttgcctgcctgtccctctgctccggccccccgccacctcctgcccccacctgtaggggccccaccctcctccagcacgtcttccctgcctccccaggggccaccctggtggggccccacggacctctggcctctggccagctagcagccttccacatcgctgccccgctccctgtcactgccacacgctgggacttcggagacggctccgccgaggtggatgccgctgggccggctgcctcgcatcgctatgtgctgcctgggcgctatcacgtgacggccgtgctggccctgggggccggctcagccctgctggggacagacgtgcaggtggaagcggcacctgccgccctggagctcgtgtgcccgtcctcggtgcagagtgacgagagcctcgacctcagcatccagaaccgcggtggttcaggcctggaggccgcctacagcatcgtggccctgggcgaggagccggcccgaggtgagtgtctgctgcccactccccttcctccccagggccatccagatggggcagagcctggtacccccgtcttgggcccacactgaccgttgacaccctcgttcccaccggtctccagcggtgcacccgctctgcccctcggacacggagatcttccctggcaacgggcactgctaccgcctggtggtggagaaggcggcctggctgcaggcgcaggagcagtgtcaggcctgggccggggccgccctggcaatggtggacagtcccgccgtgcagcgcttcctggtctcccgggtcaccaggtgcctgcccccaccccccgaggggccataggttgggagatctctgaagcactggggcagagcctgcggctggggagtctcaggaggaaggaggtgggagctgggccggccctggtgagcaggtggcgccggccggtggggccgttcctgtcagctctgcagatgcagaggtggacatgagctgggggcagcctccggacactcctgggcacgccatacgggaggtggcctgcacggggatccctgccggtacccacaggccccgtgggtgggtgctgctgtgagcctgggctggtgggccctggtctccgggctctgagcctcagtttccccatctggaaagggggacagtgatggggctcccagcgggctgctgtgagggtgggaggatggaggagtgccctgagccccctgccatcccacacccgcccccaggagcctagacgtgtggatcggcttctcgactgtgcagggggtggaggtgggcccagcgccgcagggcgaggccttcagcctggagagctgccagaactggctgcccggggagccacacccagccacagccgagcactgcgtccggctcgggcccaccgggtggtgtaacaccgacctgtgctcagcgccgcacagctacgtctgcgagctgcagcccggaggtgtgcggggggccaggcaggggcctgagacgctggctgtggttaggggcctgccgagcgcccgcggtggagcctgggctgaggaggaggggctggtgggggggttttcgggcggctcggtccccagtctgttcgtcctggtgtcctgggccctggcccggcgcctcactgtgcactcgccaccccaggcccagtgcaggatgccgagaacctcctcgtgggagcgcccagtggggacctgcagggacccctgacgcctctggcacagcaggacggcctctcagccccgcacgagcccgtggaggtagtcggccccccacgttctacaacctgccctcctgcctgcccctggaggccttgcctgccctgcccactgtgggtctcgccaaaaaacttgggggccttaatgttgcttgtgcccagtgaagatggttgggaaaatccagagtgcagagaggaaagcgtttactcacattacctccaggccttttctctgagcgtgtgtgagttattcctgaaaggcaggtcaggggtcctgccccccatggacagtttccaccggagtcttcctctcgagcgacaggagccaggcctgtgggggtctgatggctcgctctccttccctcccctcttcctgggaagttcgggtagggggagtctgggcttcaggctgggatggggtctgtggagctgaggcggccccctgcccaccaggtcatggtattcccgggcctgcgtctgagccgtgaagccttcctcaccacggccgaatttgggacccaggagctccggcggcccgcccagctgcggctgcaggtgtaccggctcctcagcacagcaggtgggactctgggtggtgggtggtgggtggtgggcgccgcaggactcggggtggcctctctgagctttcacgtctgctggtcctgtggccaccagagtggttcccagtcttaggtggacagagcaggggttccagagacaccagctcattccaggtgtcctgggggtggattgggtggggcctgcctgggggccggcctgggtcagtcggctggccggagacggacgcagcactgggctgggagtgctgcccaggtggggagacctgtcctcacagcaaggccaggattgctggtgcaggcagttgggcatctctgacggtggcctgtgggcaaatcagggccccaacaccctcccctcctcacagggaccccggagaacggcagcgagcctgagagcaggtccccggacaacaggacccagctggcccccgcgtgcatgccagggggacgctggtgccctggagccaacatctgcttgccgctggacgcctcctgccacccccaggcctgcgccaatggctgcacgtcagggccagggctacccggggccccctatgcgctatggagagagttcctcttctccgttcccgcggggccccccgcgcagtactcggtgtgtggccctgacctgggtctgttccctgcatctcctcaggccaccttcctgtctgctgcccagggtctgggtctgtgcaccagacacacccagcctgcaggcccctcccacgtccttgccacctctgacctccgacctctgcagtgccctcggccctctcccagtgggagaagctctcgcctgggcccttggcacgagctgtgcctcctcttcctctctcccagcacagctgctccttcctgtctgccaggtcttggcctgtgtcctctccccgtgtgtcccccggtctgcaactgtcctgcctgtccttgtcacgagcactgtggggaggctccttgaggtgtggctgacgaagcggggagccctgcgtgtccaccctcatccgtcgtgcgggggtccacgggccatgaccgtgaggacgtgatgcagccctgcctccctctccacaggtcaccctccacggccaggatgtcctcatgctccctggtgacctcgttggcttgcagcacgacgctggccctggcgccctcctgcactgctcgccggctcccggccaccctggtccccgggccccgtacctctccgccaacgcctcgtcatggctgccccacttgccagcccagctggagggcacttgggcctgccctgcctgtgccctgcggctgcttgcagccacggaacagctcaccgtgctgctgggcttgaggcccaaccctggactgcggctgcctgggcgctatgaggtccgggcagaggtgggcaatggcgtgtccaggcacaacctctcctgcagctttgacgtggtctccccagtggctgggctgcgggtcatctaccctgccccccgcgacggccgcctctacgtgcccaccaacggctcagccttggtgctccaggtggactctggtgccaacgccacggccacggctcgctggcctgggggcagtgtcagcgcccgctttgagaatgtctgccctgccctggtggccaccttcgtgcccggctgcccctgggagaccaacgataccctgttctcagtggtagcactgccgtggctcagtgagggggagcacgtggtggacgtggtggtggaaaacagcgccagccgggccaacctcagcctgcgggtgacggcggaggagcccatctgtggcctccgcgccacgcccagccccgaggcccgtgtactgcagggagtcctagtggtgagtatggccgaggctccaccaccagcccccaggcaggtgcctgcagacagggtgctcacacagggcgtgaggcctggcttcccagtgagggcagcagcccagttactggggacgtcggccccgggcaggtcctgctggctggctcctcgggctacctggtgggctttaaattcctggaaagtcacggctctgacagtggctccgctaactcattccactgtctcatttcacaaaatgaatttaaaactctgctccctgacctcacacgagcccccgtgagtctctcacgccctctgctgtgttctcgcctggctaaagcgagtggcttttgaggtggagtctgaacccctgatgggaaactgcgggctgcccgcggtgccaccatgctgggtacatgggggacagggctgtctccatcttgcgggtacctgcctcttcaccaggggccttgggaggggccatcagaaatggcgtgacctgtgcagcctgtcctgggttctgtaagccagtgtaggtgcctcccctcactgctccgagctctctgggtgaggagctggggcaagagcgccgggagggtctgagaagactcagagagaggtggactctttgtagctggtactaggtttgctttacagatggggaaactgaggcacagagaggttgaggcattagtagtactacatggctggctggagagccggacagtgagtgtcccagcccgggcttggctcccatggcatgcagagccccgggcacctcctctcctctgtgccccgcgtgggactctccagcccgacgggaggtgtgtccaggaggcgacaggctaagggcagagtcctccacagagcccaggctgacaccattccccccgcagaggtacagccccgtggtggaggccggctcggacatggtcttccggtggaccatcaacgacaagcagtccctgaccttccagaacgtggtcttcaatgtcatttatcagagcgcggcggtcttcaagctctcagtaggtgggcgggggtggggaggggaggggatggggcggggcagggcgggggcgggctccaccttcacctctgccttctgctctgcttcatgctgcccgaggacgctgccatggctgtgggtgagtggagggagggacgccaatcagggccaggcctctcacctgccacctgggctcactgacgcctgtccctgcagctgacggcctccaaccacgtgagcaacgtcaccgtgaactacaacgtaaccgtggagcggatgaacaggatgcagggtctgcaggtctccacagtgccggccgtgctgtcccccaatgccacgctagcactgacggcgggcgtgctggtggactcggccgtggaggtggccttcctgtgagtgactcgggggccggtttggggtgggcaccaggctcttgtcccagccccagcctcagccgagggacccccacatcacggggttgcttttctgagcctcggtttccctgtctgttgggaggtaactgggtgcacaggagccctgaggctgcacgggagccgggagaggcctcagcacagccgggtgggccctgaatggaggcccggggcgtgactgcagagtggagcctcggctgggtcccaagcaccccctgccccgccaccgcccacccctgtcccggttcactcactgcgtcccaccgccccggcaggtggacctttggggatggggagcaggccctccaccagttccagcctccgtacaacgagtccttcccggttccagacccctcggtggcccaggtgctggtggagcacaatgtcatgcacacctacgctgccccaggtgagggatgagggggtgagggggccactgcctttcaggctctgagcacggggtccccccagctccccagtcaagctgccccccttcctccccaacagccctcactgtgacctcacctgggctgatggcttaggcccctactggggtgagggaggggccaggcgtggggggagtggacagggaagctgggcccctgaactgcgccccccgccctccccgggcctggctcttgctgctctgctgccccgagtgcagctgcacttggaggcggtgccgtcctcgccaggcagccctcagtgctgctacacctgtgctccgtcccgcacgtggcttgggagcctgggacccttaaggctgggccgcaggtgcagccgttcaccccgggctcctcaggcggggggcttctgccgagcgggtggggagcaggtgggggtgccgcggctgccccactcgggcctgtccccacaggtgagtacctcctgaccgtgctggcatctaatgccttcgagaacctgacgcagcaggtgcctgtgagcgtgcgcgcctccctgccctccgtggctgtgggtgtgagtgacggcgtcctggtggccggccggcccgtcaccttctacccgcacccgctgccctcgcctgggggtgttctttacacgtgggacttcggggacggctcccctgtcctgacccagagccagccggctgccaaccacacctatgcctcgaggggcacctaccacgtgcgcctggaggtcaacaacacggtgagcggtgcggcggcccaggcggatgtgcgcgtctttgaggagctccgcggactcagcgtggacatgagcctggccgtggagcagggcgcccccgtggtggtcagcgccgcggtgcagacgggcgacaacatcacgtggaccttcgacatgggggacggcaccgtgctgtcgggcccggaggcaacagtggagcatgtgtacctgcgggcacagaactgcacagtgaccgtgggtgcggccagccccgccggccacctggcccggagcctgcacgtgctggtcttcgtcctggaggtgctgcgcgttgaacccgccgcctgcatccccacgcagcctgacgcgcggctcacggcctacgtcaccgggaacccggcccactacctcttcgactggaccttcggggatggctcctccaacacgaccgtgcgggggtgcccgacggtgacacacaacttcacgcggagcggcacgttccccctggcgctggtgctgtccagccgcgtgaacagggcgcattacttcaccagcatctgcgtggagccagaggtgggcaacgtcaccctgcagccagagaggcagtttgtgcagctcggggacgaggcctggctggtggcatgtgcctggcccccgttcccctaccgctacacctgggactttggcaccgaggaagccgcccccacccgtgccaggggccctgaggtgacgttcatctaccgagacccaggctcctatcttgtgacagtcaccgcgtccaacaacatctctgctgccaatgactcagccctggtggaggtgcaggagcccgtgctggtcaccagcatcaaggtcaatggctcccttgggctggagctgcagcagccgtacctgttctctgctgtgggccgtgggcgccccgccagctacctgtgggatctgggggacggtgggtggctcgagggtccggaggtcacccacgcttacaacagcacaggtgacttcaccgttagggtggccggctggaatgaggtgagccgcagcgaggcctggctcaatgtgacggtgaagcggcgcgtgcgggggctcgtcgtcaatgcaagccgcacggtggtgcccctgaatgggagcgtgagcttcagcacgtcgctggaggccggcagtgatgtgcgctattcctgggtgctctgtgaccgctgcacgcccatccctgggggtcctaccatctcttacaccttccgctccgtgggcaccttcaatatcatcgtcacggctgagaacgaggtgggctccgcccaggacagcatcttcgtctatgtcctgcagctcatagaggggctgcaggtggtgggcggtggccgctacttccccaccaaccacacggtacagctgcaggccgtggttagggatggcaccaacgtctcctacagctggactgcctggagggacaggggcccggccctggccggcagcggcaaaggcttctcgctcaccgtgctcgaggccggcacctaccatgtgcagctgcgggccaccaacatgctgggcagcgcctgggccgactgcaccatggacttcgtggagcctgtggggtggctgatggtggccgcctccccgaacccagctgccgtcaacacaagcgtcaccctcagtgccgagctggctggtggcagtggtgtcgtatacacttggtccttggaggaggggctgagctgggagacctccgagccatttaccacccatagcttccccacacccggcctgcacttggtcaccatgacggcagggaacccgctgggctcagccaacgccaccgtggaagtggatgtgcaggtgcctgtgagtggcctcagcatcagggccagcgagcccggaggcagcttcgtggcggccgggtcctctgtgcccttttgggggcagctggccacgggcaccaatgtgagctggtgctgggctgtgcccggcggcagcagcaagcgtggccctcatgtcaccatggtcttcccggatgctggcaccttctccatccggctcaatgcctccaacgcagtcagctgggtctcagccacgtacaacctcacggcggaggagcccatcgtgggcctggtgctgtgggccagcagcaaggtggtggcgcccgggcagctggtccattttcagatcctgctggctgccggctcagctgtcaccttccgcctgcaggtcggcggggccaaccccgaggtgctccccgggccccgtttctcccacagcttcccccgcgtcggagaccacgtggtgagcgtgcggggcaaaaaccacgtgagctgggcccaggcgcaggtgcgcatcgtggtgctggaggccgtgagtgggctgcaggtgcccaactgctgcgagcctggcatcgccacgggcactgagaggaacttcacagcccgcgtgcagcgcggctctcgggtcgcctacgcctggtacttctcgctgcagaaggtccagggcgactcgctggtcatcctgtcgggccgcgacgtcacctacacgcccgtggccgcggggctgttggagatccaggtgcgcgccttcaacgccctgggcagtgagaaccgcacgctggtgctggaggttcaggacgccgtccagtatgtggccctgcagagcggcccctgcttcaccaaccgctcggcgcagtttgaggccgccaccagccccagcccccggcgtgtggcctaccactgggactttggggatgggtcgccagggcaggacacagatgagcccagggccgagcactcctacctgaggcctggggactaccgcgtgcaggtgaacgcctccaacctggtgagcttcttcgtggcgcaggccacggtgaccgtccaggtgctggcctgccgggagccggaggtggacgtggtcctgcccctgcaggtgctgatgcggcgatcacagcgcaactacttggaggcccacgttgacctgcgcgactgcgtcacctaccagactgagtaccgctgggaggtgtatcgcaccgccagctgccagcggccggggcgcccagcgcgtgtggccctgcccggcgtggacgtgagccggcctcggctggtgctgccgcggctggcgctgcctgtggggcactactgctttgtgtttgtcgtgtcatttggggacacgccactgacacagagcatccaggccaatgtgacggtggcccccgagcgcctggtgcccatcattgagggtggctcataccgcgtgtggtcagacacacgggacctggtgctggatgggagcgagtcctacgaccccaacctggaggacggcgaccagacgccgctcagtttccactgggcctgtgtggcttcgacacaggtcagtgcgtggcagggccgtcctccatgcccctcacccgtccacacccatgagcccagagaacacccagcttgccaccagggctggcccgtcctcagtgcctggtgggccccgtcccagcatggggagggggtctcccgcgctgtctcctgggccgggctctgctttaaaactggatggggctctcaggccacgtcgccccttgttctcggcctgcagagggaggctggcgggtgtgcgctgaactttgggccccgcgggagcagcacggtcaccattccacgggagcggctggcggctggcgtggagtacaccttcagcctgaccgtgtggaaggccggccgcaaggaggaggccaccaaccagacggtgggtgccgcccgcccctcggccacttgccttggacagcccagcctccctggtcatctactgttttccgtgttttagtgctggtggaggccgcacgctctcccctctctgtttctgatgcaaattctatgtaacacgacagcctgcttcagctttgcttccttccaaacctgccacagttccacgtacagtcttcaagccacatatgctctagtggcaaaagctacacagtcccctagcaataccaacagtgaggaagagccccttcccaccccagaggtagccactgtccccagcccatgtccctgttgctggatgtggtgggccggttctcaccctcacgctcccctctctggaccggccaggaggcttggtgaccctgagcccgtggtggctgctcctgctgctgtcaggcggggcctgctggtgccccagagtgggcgtctgttccccagtccctgctttcctcagctggcctgattgggggtcttcccagaggggtcgtctgaggggagggtgtgggagcaggttccatcccagctcagcctcctgacccaggccctggctaagggctgcaggagtctgtgagtcaggcctacgtggcagctgcggtcctcacacccacacatacgtctcttctcacacgcatccccccaggggccctcagtgagcattgcctgcctcctgctagggtccagctgggtccagtacaccagaacgcacactccagtgtcctctgccctgtgtatgcccttccgccgtccaagttggaaggtggcaaaccggatgagtatcctgggagggagtgagctcaccggcagtggccaggcccctgggaaacctggagtttgggagcagcatcctccatgggtcccccagtccttccagcaggccaaatagacctgtgttggaggtaaccccactcccacgccaggtgctgatccggagtggccgggtgcccattgtgtccttggagtgtgtgtcctgcaaggcacaggccgtgtacgaagtgagccgcagctcctacgtgtacttggagggccgctgcctcaattgcagcagcggctccaagcgaggggtgagtgttgagcggggtgtgggcgggctggggatgggtcccatggccgaggggacggggcctgcaggcagaagtggggctgacagggcagagggttgcgccccctcaccaccccttctgcctgcagcggtgggctgcacgtacgttcagcaacaagacgctggtgctggatgagaccaccacatccacgggcagtgcaggcatgcgactggtgctgcggcggggcgtgctgcgggacggcgagggatacaccttcacgctcacggtgctgggccgctctggcgaggaggagggctgcgcctccatccgcctgtcccccaaccgcccgccgctggggggctcttgccgcctcttcccactgggcgctgtgcacgccctcaccaccaaggtgcacttcgaatgcacgggtgagtgcaggcctgcgtggggggagcagcgggatcccccgactctgtgacgtcacggagccctcccgtgatgccgtggggaccgtccctcaggctggcatgacgcggaggatgctggcgccccgctggtgtacgccctgctgctgcggcgctgtcgccagggccactgcgaggagttctgtgtctacaagggcagcctctccagctacggagccgtgctgcccccgggtttcaggccacacttcgaggtgggcctggccgtggtggtgcaggaccagctgggagccgctgtggtcgccctcaacaggtgagccaggccgtgggagggcgcccccgagactgccacctgctcaccacccccctctgctcgtaggtctttggccatcaccctcccagagcccaacggcagcgcaacggggctcacagtctggctgcacgggctcaccgctagtgtgctcccagggctgctgcggcaggccgatccccagcacgtcatcgagtactcgttggccctggtcaccgtgctgaacgaggtgagtgcagcctgggaggggacgtcacatctgctgcatgcgtgcttgggaccaagacctgtacccctgcctggagctttgcagagggctcatcccgggccccagagataaatcccagtgaccctgaagcagcaccccgaccttccgctcccagcagccacacccaccgggccctctccggcgtctgctttccacaatgcagcccccgcccaggagggcccatgtgcttaccctgttttgcccatgaagaaacagctcagtgttgtgggtcagtgcccgcatcacacagcgtctagcacgtaactgcaccccgggagtcgtgggcatctgctggcctcctgccggcctcctgcgctgctgacagcttgctgtgccccctgcctgccccagtacgagcgggccctggacgtggcggcagagcccaagcacgagcggcagcaccgagcccagatacgcaagaacatcacggagactctggtgtccctgagggtccacactgtggatgacatccagcagatcgctgctgcgctggcccagtgcatggtaggatggccccacctgctcaccctgccccgcatgcctgccagggcactgggttcagccccccagggcagacgggcagcttggccgaggagctgagcctccagcctgggctccttcctgccatggcgttcctcggtctctgacctgcttcagtagcctcagccgttctgtcctgtgtgaacgcagggtgcctctcgggggacccagggtgtaaagaggggcccagatgtggggagggactaagaagatgctgctctgtgccctccactctcccctcccctcccctcccccttccctcccctagcccctcccctcctcccctcccctagcccttcccctcctcccctcccctagccctttcccttcttcccccccagcccttcccctcctcccctcccctttttctccactcccctctcctctctcccctcctcctccgctctcatgtgaagaggtgccttgtgtggtcggtgggctgcatcacgtggtccccaggtggaggccctgggtcatgcagagccacagaaaatgcttagtgaggaggctgtgggggtccagtcaagtgggctctccagctgcagggctgggggtgggagccaggtgaggacccgtgtagagaggagggcgtgtgcaaggagtggggccaggagcggggctggacactgctggctccacacaggggcccagcagggagctcgtatgccgctcgtgcctgaagcagacgctgcacaagctggaggccatgatgctcatcctgcaggcagagaccaccgcgggcaccgtgacgcccaccgccatcggagacagcatcctcaacatcacaggtgccgcggcccgtgccccatgccacccgcccgccccgtgcggccctttcctctgcctccctcctccccccaaccgcgtcgcctttgccccatcccatcttcgtccccctcccctccccccaattcccatcctcatccccctcccccaattcccattctcctccccctcccccttccctattaccatcccttttctccatctctctccccttttctccatttccccccccgtcctccccgtccttttgtccattcccctcatcttcctcatccccctcatcccccttcccctcccttatcccccttcccctccctttccccctgctcctcttcttctcccttctcttttctctacccttttccttcctttttcctccctctccccatcatccccctcatcttcgtcctcatccccatcaccttccccctcccccctccaccactctctctccagcttcccccttccttctgcctgcacctcgctctctgccccctcaggttccccctttctcccagcccccaccctccggctccccctttttgcctgcccccaccctccctctacctccctgtctctgcactgacctcacgcatgtctgcaggagacctcatccacctggccagctcggacgtgcgggcaccacagccctcagagctgggagccgagtcaccatctcggatggtggcgtcccaggcctacaacctgacctctgccctcatgcgcatcctcatgcgctcccgcgtgctcaacgaggagcccctgacgctggcgggcgaggagatcgtggcccagggcaagcgctcggacccgcggagcctgctgtgctatggcggcgccccagggcctggctgccacttctccatccccgaggctttcagcggggccctggccaacctcagtgacgtggtgcagctcatctttctggtggactccaatccctttccctttggctatatcagcaactacaccgtctccaccaaggtggcctcgatggcattccagacacaggccggcgcccagatccccatcgagcggctggcctcagagcgcgccatcaccgtgaaggtgcccaacaactcggactgggctgcccggggccaccgcagctccgccaactccgccaactccgttgtggtccagccccaggcctccgtcggtgctgtggtcaccctggacagcagcaaccctgcggccgggctgcatctgcagctcaactatacgctgctggacggtgcgtgcagcgggtggggcacacgcggccccctggccttgttcttggggggaaggcgtttctcgtagggcttccatgggtgtctctggtgaaatttgctttctgtttcatgggctgctgggggcctggccagagaggagctgggggccacggagaagcaggtgccagctctggtgcagaggctcctatggcctttcaggcccgtggcagagggtgggctcaggagggccatcgtgggtgtcccccgggtggttgagcttcccggcaggcgtgtgacctgcgcgttctgccccaggccactacctgtctgaggaacctgagccctacctggcagtctacctacactcggagccccggcccaatgagcacaactgctcggctagcaggaggatccgcccagagtcactccagggtgctgaccaccggccctacaccttcttcatttccccggggtgagctctgcgggccagcctggcagggcagggcagggcatcatgggtcagcattgcctgggttactggccccatggggacggcaggcagcgaggggactggaccgggtatgggctctgagactgcgacatccaacctggcggagcctgggctcacgtccgctaccccttccctgcccaggagcagagacccagcggggagttaccatctgaacctctccagccacttccgctggtcggcgctgcaggtgtccgtgggcctgtacacgtccctgtgccagtacttcagcgaggaggacatggtgtggcggacagaggggctgctgcccctggaggagacctcgccccgccaggccgtctgcctcacccgccacctcaccgccttcggcgccagcctcttcgtgcccccaagccatgtccgctttgtgtttcctgtgagtgaccctgtgctcctgggagcctctgcagagtcgaggagggcctgggtgggctcggctctatcctgagaaggcacagcttgcacgtgacctcctgggcccggcggctgtgtcctcacaggagccgacagcggatgtaaactacatcgtcatgctgacatgtgctgtgtgcctggtgacctacatggtcatggccgccatcctgcacaagctggaccagttggatgccagccggggccgcgccatccctttctgtgggcagcggggccgcttcaagtacgagatcctcgtcaagacaggctggggccggggctcaggtgaggggcgcagcggggtggcagggcctcccctgctctcactggctgtgctggttgcaccctctgggagtgagtctcgtcgcaggcgtcagaacaaggcagtttttgcagtgctgtgtgaagggctcgtgtgttcatcctgggaatgacctcgtgagcactcactgtccctgaggactaggacagctcctagctggaagtaggtgccagtcagtcagggtgggcagcccacgttctgcacagtagcgtggccccacaagtgacgtgagcatcgctaccactgtgggagactgtgcatccacccgcgatcctgactgcatagctcgtctctcagacggaggcgccagcaccctccccgtggctgtttcttcagtacctccattttcctttcattggaattgcccttctggcattccctttttgttttcgtttttctttttttagagacggagtctcactctgttgcccaggctggagtgcaatggcatgatcttggctcacagcaacttccagctcccgggtttaagccattccccttaagcgattctcctgagtagctgggagtacaggtgcacaccaccacacccagttaatttttcaccatgtcagccaggcgaactcctgacctcaggtgatccgcctgcctcggcctgccagagtgctgggatgacaggtgtgagccaccacacctggctgtgttcccattttttatctctgtgctgctttcctcttcattgcccagttctttcttttgattacctacttttaaaaactgtcggccgggcgcggtggctcacacctgtaatccgagcactttgggaggccaggcaggcaaatcacggggtcaggagatcgagaccatcctggctaacggtgaaaccctgtctctaataaaaagtacaaaaaaattagcccggcgtagtggcaggcgcctgtagtcccagctccttgggagactgaggcaggagaatggcgtgaacccgggaggcggagcttgcagtgagctgagattgcgccactgcactccagcctgggtgacacagcaagactccatctcaaaaaaaaaagaaaaaaaatactgtcacctgggtctgtcactgggagaggaggtgacacagcttcacgctttgcagtctgtgcatgaactgagggacgggtgtgtggtgcgggtcaccggttgtggcatgactgaggcgtggacaggtgtgcagtgcgggtcactggttgtggtgtggactgaggcgtgtgcagccatgtttgcatgtcacaagttacagttctttccatgtaacttaatcatgtccttgaggtcctgctgttaattggacaaattgcagtaaccgcagctccttgtgtatggcagagccgtgcaaagccgggactgcctgtgtggctccttgagtgcgcacaggccaaagctgagatgacttgcctgggatgccacacgtgttgggcagcagaccgagcctcccacccctccctcttgcctcccaggtaccacggcccacgtgggcatcatgctgtatggggtggacagccggagcggccaccggcacctggacggcgacagagccttccaccgcaacagcctggacatcttccggatcgccaccccgcacagcctgggtagcgtgtggaagatccgagtgtggcacgacaacaaaggtttgtgcggaccctgccaagctctgcccctctgcccccgcattggggcgccctgcgagcctgacctccctcctgcgcctctgcagggctcagccctgcctggttcctgcagcacgtcatcgtcagggacctgcagacggcacgcagcgccttcttcctggtcaatgactggctttcggtggagacggaggccaacgggggcctggtggagaaggaggtgctggccgcgagtaaggcctcgttccatgttcccactccgtgggaggttgggcagggtggtcctgccccgtggcctcctgcagtgcggccctccctgccttctaggcgacgcagcccttttgcgcttccggcgcctgctggtggctgagctgcagcgtggcttctttgacaagcacatctggctctccatatgggaccggccgcctcgtagccgtttcactcgcatccagagggccacctgctgcgttctcctcatctgcctcttcctgggcgccaacgccgtgtggtacggggctgttggcgactctgcctacaggtgggtgccgtaggggtcggggcagcctcttcctgcccagcccttcctgcccctcagcctcacctgtgtggcctcctctcctccacacagcacggggcatgtgtccaggctgagcccgctgagcgtcgacacagtcgctgttggcctggtgtccagcgtggttgtctatcccgtctacctggccatcctttttctcttccggatgtcccggagcaaggtgggctggggctggggacccgggagtactgggaatggagcctgggcctcggcaccatgcctagggccgccactttccagtgctgcagccagagggaaaggcgtccaccaaaggctgctcgggaagggtcaacacacttgagcagccttagctagactgaccagggagaaagagagaagactcagaagccagaatggtgaaagaacgagggcactttgctaagcagacgccacggacgactgcacagcagcacgccagataactcagaagaagcaagcacgcggctgtgcacgcttccgaaatgcactccagaagaaaatctcagtacatctataggaagtgaagaggctgagttagtcccttagaaacgtcccagtggccgggccgggtgtggtggctcacgcctgtaatcccaacacttcaggtggccgaggtgggcggatctgagtccaggagtttgagaccagcctgggcaacatagcaagaccccatctatataaaacattaaaaagggccaggcgcggtggctcacgcctgtaatcccagcactttgggaggccgaggcgggcagatcacttgaggtcaggagttcgagaccagcctggccaacacaatgaaaccccgactctactacaaatacaaaaacttagctgggcatggtggcgggcgcctgtagtcccagctactcgagaggctgaggcaggagaatggcatgaacccaggaggcggagcttgcagtgagccgagattgcgccactgcactccatcctgggcaacggagcaagactccatctccaaaaaaaaaaaaaaaaaatcccacaaagaaaagctcaggctcagagccttcacgatagaatttttctaagcagttaaggaagaattaacaccaatccttcacagactctttccaagaatacagcaggtgggaacgcttcccattcatacggaaacgggaggccgcaccccttaggaatgcacacgtggggtcctcaagaggttacatgcaaactaaccccagcagcacacagagaaggcgcataagccgcgaccaggaggggttgctcccgagtccgtggcaggaaccagaggccacatgtggctgctcgtatttaagttaattaaaatggaacgatggccgggtgtggtggctcacacctgtaatcccagcactttgggaggcggaggcgggcagatcacttgaggtcaggagttccaagaccagcctggccaacacagtgaaaccccgtctctactaaaaatacaaaaaattagctgggcatggtggcaggcacctgtaatcccagctactcaggaggctgagccaggacaatcgcctgaacgcgggaggtggaggttgcagtgagctgagattgcgccattgcactccagcctgggtgacagcgagactccatctaaaaaagaaaatatgaaatttaaaactctgttccttagctgcaccagtctgctgtcaagtgttcagtggcacacgtcgcgaggggctgccatcacggacggtgcagatgtcccatatatccagcattctaggacattctgtcagatggcaccgggctctgtcctgtctgctgaggaggtggcttctcatccctgtcctgagcaggtctgagctgccgcccgctgaccactgccctcgtcctgcaggtggctgggagcccgagccccacacctgccgggcagcaggtgctggacatcgacagctgcctggactcgtccgtgctggacagctccttcctcacgttctcaggcctccacgctgaggtgaggactctactgggggtcctgggctgggctgggggtcctgccgccttggcgcagcttggactcaagacactgtgcacctctcagcaggcctttgttggacagatgaagagtgacttgtttctggatgattctaagaggtgggttccctagagaaacctcgagccctggtgcaggtcactgtgtctggggtgccgggggtgtgcgggctgcgtgtccttgctgggtgtctgtggctccatgtggtcacaccacccgggagcaggtttgctcggaagcccagggtgtccgtgcgtgactggacgggggtgggctgtgtgtgtgacacatcccctggtaccttgctgacccgcgccacctgcagtctggtgtgctggccctccggcgagggaacgctcagttggccggacctgctcagtgacccgtccattgtgggtagcaatctgcggcagctggcacggggccaggcgggccatgggctgggcccagaggaggacggcttctccctggccagcccctactcgcctgccaaatccttctcagcatcaggtgagctggggtgagaggagggggctctgaagctcacccttgcagctgggcccaccctatgcctcctgtacctctagatgaagacctgatccagcaggtccttgccgagggggtcagcagcccagcccctacccaagacacccacatggaaacggacctgctcagcagcctgtgagtgtccggctctcgggggaggggggattgccagaggaggggccgggactcaggccaggcagccgtggttcccgcctggggtagggtggggtggggtgccagggcagggctgtggctgcaccacttcacttctctgaacctctgttgtctgtggaaagagcctcatgggatccccagggccccagaaccttccctctagggagggagcaggctcatggggctttgtaggagcagaaaggctcctgtgtgaggctggccggggccacgtttttatcttggtctcagagcagtgagaaattatgggcgggtttttaaataccccatttttggccgggcgcggtggctcacacgtgtaatcccagcactttgggaggccgaggtgggcagatgacctgaggtcagcagttcgagaccagcctggccaacatggcgaaaccccgtctctactaaaaatacaaaaaattagccgggcatgctggcaggcgcctgtagtcccagttactcgggagactgaggtaggagaatcgattgaacctggtaggtgaaggttgtagtgagccgagatcgcgccactgcactccagcctgggcaacaagagcgaaactccgtctcaaaaacaaaaaaattcctcaatttcttggttgttttgtaacttatcaacaaatggtcatatagaggttaccttgtatgtagtcacgcacatagtcacgcacatggcagccggcggcggagcgcacccacggcgtgttcccacgcgtgtgaccccgggctctgccatgccctcctatgctcaggtgtgctgaggtccacacggccctgccgttgcactgcagctgcctgcaggattcagtgcagtggcatgcagtgcaggtgcggtgccccggagccacaggccacaccacagggcctgcatgcacaggggctgcggtgtctgggtttgggtaactacgccctgtgacatttgcacagcaacagaattacctaatgacgcatttctcagaacacatccctggcactaagtggtgcgtgactgctgcttttgcatccacatctagtttgatttgtgtgttattcctttgagtgcttctcattgttaagcaaccaagaactaaagaggtatgaactgcccctggactcaaacaaaaaggaaaacttcctgatttacaaaaggcagataaccatcacatgagggcatctttatgaataaattgctggttggttttaaaaatacagagtatggggaaatccaggggtagtcactacatgctgaccagccccaggtatctccggcccaaagctctgtgaaatccagattcagtgcttccgcggggatttctgacggcagctcagactccgcatccacacagagcgcgtggccctcaccctcccggcttcctcaacccttggccgtcccttgctcggacagtgcttcgggctgaccaggtcggaggcttgggtttgtcctggacccctctgcgtccttcctcactgcagcctccagcgcgtcccgtggctcctttcccaacgcagagcacggccttccctgcgcctgagcctgcaccctccgtcctggcggcgcctctgccctggcattccctgccactccatgcctccctattggccattctccgtctctgccagcgagagcctgctccctgagtcagaccctgagtcatttgtgttgctataaaggaatagttgaggctgggttattttttatttttatttatttttttgagatggagtctctgttgcccagactggagtgcagtcgcatgatctcggctcactgcaaagtctgcctcccacgttcaagcagttatctgcctcagcctcccaagtagctaagattacaggcgcccgccgccacagccggctaattttttgtgtgtgtgttttagtagagaggaggtttcaccatcttagccaggctggtcttgaactcctgacctcgtgatccacccatctcagcctcccaaaatgctgagattacaggcgtgagccaccacgcctgaccaagttgaggctaggtcattttttaattttttgtaaagacagggtctcactgtctccaactcctgagctcaagtgatcctcctgcctcagcctcctgaagtgctgggattacaggcttgagacactgcgcccagccaagagtgtcttttatcctccgagagacagcaaaacaggaagcattcagtgcagtgtgaccctgggtcaggccgttctttcggtgatgggctgacgagggcgcaggtacgggagagcgtcctgagagcccgggactcggcgtctcgcagttggtctcgtcctccccctcaacgtgtcttcgctgcctctgtacctcttctctagcagctctgggaccgggcatatcagcatggtggcccgatgcagtggcacagcctcggtggtcactggctcctggagacacaagcagatctctggcctcagggagccctacacactgttgggatttgaaaggcattcatatgtttccttgtccagaagttaattttaggccataaacctgcatgggacagacacactggcgtctctagattgtagagatgcttgttggatggttgagacccaatcatagtttgcagggttgaaggggggctcattgcaccctgagagactgtgcactgctgtaagggcagctggtcaggctgtgggcgatgggtttatcagcagcaagcgggcgggagagggacgcaggcggacgcctgacttcggtgcctggagtggctcttggttccctggctcccagcaccactcccactctcgtttggggtagggtcttccggctttttgtcggggggaccctgtgacccaagaggctcaagaaactgcccgcccaggttaacatgggcttggctgcaactgcctcctggaggccgggatgaattcacagcctaccatgtccctcaggtccagcactcctggggagaagacagagacgctggcgctgcagaggctgggggagctggggccacccagcccaggcctgaactgggaacagccccaggcagcgaggctgtccaggacaggtgtgcttgcgtagccccgggatgcccctagcccctccctgtgagctgcctctcacaggtctgtctctgcttccccaggactggtggagggtctgcggaagcgcctgctgccggcctggtgtgcctccctggcccacgggctcagcctgctcctggtggctgtggctgtggctgtctcagggtgggtgggtgcgagcttccccccgggcgtgagtgttgcgtggctcctgtccagcagcgccagcttcctggcctcattcctcggctgggagccactgaaggtgagggggctgccaggggtaggctacaggcctccatcacgggggacccctctgaagccaccccctccccaggtcttgctggaagccctgtacttctcactggtggccaagcggctgcacccggatgaagatgacaccctggtagagagcccggctgtgacgcctgtgagcgcacgtgtgccccgcgtacggccaccccacggctttgcactcttcctggccaaggaagaagcccgcaaggtcaagaggctacatggcatgctgcgggtgagcctgggtgcggcctgtgcccctgccacctccgtctcttgtctcccacctcccacccatgcacgcaggacactcctgtccccctttcctcacctcagaaggcccttaggggttcaatgctctgcagcctttgcccggtctccctcctaccccacgccccccacttgctgccccagtccctgccagggcccagctccaatgcccactcctgcctggccctgaaggcccctaagcaccactgcagtggcctgtgtgtctgcccccaggtggggttccgggcagggtgtgtgctgccattaccctggccaggtagagtcttggggcgccccctgccagctcaccttcctgcagccacacctgccgcagccatggctccagccgttgccaaagccctgctgtcactgtgggctggggccaggctgaccacagggcccccccgtccaccagagcctcctggtgtacatgctttttctgctggtgaccctgctggccagctatggggatgcctcatgccatgggcacgcctaccgtctgcaaagcgccatcaagcaggagctgcacagccgggccttcctggccatcacgcggtacgggcatccggtgcactggtctgtcttctgggctttagttttgcctttagtccagccagaccctaggggacatgtggacatgtgtagatacctttgtggctgctagaactggaggtaggtgctgctggcatcagtaggcagaggggagggacacaggtccgtgtcttgcagtgcacaggacgggcccatgacagacaactgtctgccccagaacatccccaggataaggctgagaagcccaggtctagccgtggccagcagggcagtgggagccatgttccctgggtctctggtggccgctcactcgaggcgggcatggggcagtaggggctggagcgtgtgactgatgctgtggcaggtctgaggagctctggccatggatggcccacgtgctgctgccctacgtccacgggaaccagtccagcccagagctggggcccccacggctgcggcaggtgcggctgcaggaaggtgagctggcagggcgtgccccaagacttaaatcgttcctcttgttgagagagcagcctttagcggagctctggcatcagccctgctccctagctgtgtgacctttgccctcttaacaccgccgtttccttctctgtatatgagagatggtaacgttgtctaattgatggctgctgggagggttccctggggtggcgccgaaccagagctcaggcgagctggccagcaggaaacactcctgttgggttttgatgaggccctggccccggcctggggctctgtgtgtttcagcactctacccagaccctcccggccccagggtccacacgtgctcggccgcaggaggcttcagcaccagcgattacgacgttggctgggagagtcctcacaatggctcggggacgtgggcctattcagcgccggatctgctggggtgagcagagcgagggccccgggcgtctacgccaaggacaagggagtagttctccaggagtgccgcggcctcctgaccagcctggctccggggtgccggaagggctggggtgcggcacccacgccacccctctccggcagggcatggtcctggggctcctgtgccgtgtatgacagcgggggctacgtgcaggagctgggcctgagcctggaggagagccgcgaccggctgcgcttcctgcagctgcacaactggctggacaacaggtgggagctccctcccctgccctctccggggtggccgcagtcaccagccaggagcccaccctcactcctccggcccccgctggcctaggcggcttccacagcccctcagccacgcctgcactgcgcggtccccgcagctcccgccctgccacccgctcctactgacccgcaccctctgcgcaggagccgcgctgtgttcctggagctcacgcgctacagcccggccgtggggctgcacgccgccgtcacgctgcgcctcgagttcccggcggccggccgcgccctggccgccctcagcgtccgcccctttgcgctgcgccgcctcagcgcgggcctctcgctgcctctgctcacctcggtacgcccgtccccggccagaccccgcgcctcccaccggcagcgtcccgccccctcgcggggccccgccccggcagcgtctcacccctcgcagcgccccgccccctcgcagcgtcccgccccctcgcagggccccgccccggcagcgtcccgccccctcgtagggccccgccccggcagcgtcccgccccctcgcagggccccgccccggcagcgtccctcccgccctcctgaccgcgccccccacaggtgtgcctgctgctgttcgccgtgcacttcgccgtggccgaggcccgtacttggcacagggaagggcgctggcgcgtgctgcggctcggagcctgggcgcggtggctgctggtggcgctgacggcggccacggcactggtacgcctcgcccagctgggtgccgctgaccgccagtggacccgtttcgtgcgcggccgcccgcgccgcttcactagcttcgaccaggtggcgcagctgagctccgcagcccgtggcctggcggcctcgctgctcttcctgcttttggtcaaggtgagggctgggccggtgggcgcggggctgggcgcacaccccagggctgcaagcagacagatttctcgtccgcaggctgcccagcagctacgcttcgtgcgccagtggtccgtctttggcaagacattatgccgagctctgccagagctcctgggggtcaccttgggcctggtggtgctcggggtagcctacgcccagctggccatcctggtaggtgactgcgcggccggggagggcgtcttagctcagctcagctcagctgtacgccctcactggtgtcgccttccccgcagctcgtgtcttcctgtgtggactccctctggagcgtggcccaggccctgttggtgctgtgccctgggactgggctctctaccctgtgtcctgccgagtcctggcacctgtcacccctgctgtgtgtggggctctgggcactgcggctgtggggcgccctacggctgggggctgttattctccgctggcgctaccacgccttgcgtggagagctgtaccggccggcctgggagccccaggactacgagatggtggagttgttcctgcgcaggctgcgcctctggatgggcctcagcaaggtcaaggaggtgggtacggcccagtgggggggagagggacacgccctgggctctgcccagggtgcagccggactgactgagcccctgtgccgcccccagttccgccacaaagtccgctttgaagggatggagccgctgccctctcgctcctccaggggctccaaggtatccccggatgtgcccccacccagcgctggctccgatgcctcgcacccctccacctcctccagccagctggatgggctgagcgtgagcctgggccggctggggacaaggtgtgagcctgagccctcccgcctccaagccgtgttcgaggccctgctcacccagtttgaccgactcaaccaggccacagaggacgtctaccagctggagcagcagctgcacagcctgcaaggccgcaggagcagccgggcgcccgccggatcttcccgtggcccatccccgggcctgcggccagcactgcccagccgccttgcccgggccagtcggggtgtggacctggccactggccccagcaggacaccccttcgggccaagaacaaggtccaccccagcagcacttagtcctccttcctggcgggggtgggccgtggagtcggagtggacaccgctcagtattactttctgccgctgtcaaggccgagggccaggcagaatggctgcacgtaggttccccagagagcaggcaggggcatctgtctgtctgtgggcttcagcactttaaagaggctgtgtggccaaccaggacccagggtcccctccccagctcccttgggaaggacacagcagtattggacggtttctagcctctgagatgctaatttatttccccgagtcctcaggtacagcgggctgtgcccggccccaccccctgggcagatgtcccccactgctaaggctgctggcttcagggagggttagcctgcaccgccgccaccctgcccctaagttattacctctccagttcctaccgtactccctgcaccgtctcactgtgtgtctcgtgtcagtaatttatatggtgttaaaatgtgtatatttttgtatgtcactattttcactagggctgaggggcctgcgcccagagctggcctcccccaacacctgctgcgcttggtaggtgtggtggcgttatggcagcccggctgctgcttggatgcgagcttggccttgggccggtgctgggggcacagctgtctgccaggcactctcatcaccccagaggccttgtcatcctcccttgccccaggccaggtagcaagagagcagcgcccaggcctgctggcatcaggtctgggcaagtagcaggactaggcatgtcagaggaccccagggtggttagaggaaaagactcctcctgggggctggctcccagggtggaggaaggtgactgtgtgtgtgtgtgtgtgcgcgcgcgcacgcgcgagtgtgctgtatggcccaggcagcctcaaggccctcggagctggctgtgcctgcttctgtgtaccacttctgtgggcatggccgcttctagagcctcgacacccccccaacccccgcaccaagcagacaaagtcaataaaagagctgtctgactgcaatctgtgcctctatgtctgtgcactggggtcaggactttatttatttcactgacaggcaataccgtccaaggccagtgcaggagggagggccccggcctcacacaaactcggtgaagtcctccaccgaggagatgaggcgcttccgctggcccacctcatagccaggtgtgggctcggctggagtctgtgcaggggctttgctatgggacggagggtgcaccagaggtaggctggggttggagtaggcggcttcctcgcagatctgaaggcagaggcggcttgggcagtaagtctgggaggcgtggcaaccgctctgcccacacacccgccccacagcttgggcagccagcacaccccgctgagggagccccatattccctacccgctggcggagccgcttgatgtggcggagccgggcaatccacttggaggggtagatatcggtggggttggagcggctatgatgcacctgtgaggccatctggggacgtaggcagggggtgagctcactatcaggtggcacctgggcctgtcccaccagctcacgcctggacccacccccactcacatttgcgtgcagggccatctggcgggccacgaagggcaggttgcggtcagacacgatcttggccacgctggtgtccacaaggccctccatgtctggggagacttggtggtcacgccaggcccagggctcttggcgccacactgcagggccccacccggccctacctttcctgcactgcagggccccacccggccctacctttcctgcactgcagggacaccaggttgcactcgtagtccagcggggtgacgatcacgtggacaaagttgaactggccctgcccggacaagagaaagggtcatccccgcacacagcgtgtgctgaaggctgatctcggctactgcctggttgcactgctagacacctgtcagctccatgggcagcatctgcccctgaactttcccctctggcagcggggctgtgtttgtctggcctccccca

SEQ ID NO: 106 - RNA, 14135 nt, Homo sapiens
  source 1..14135: mol_type = genomic RNA
gcactgcagcgccagcgtccgagcgggcggccgagctcccggagcggcctggccccgagccccgagcgggcgtcgctcagcagcaggtcgcggccgcagccccatccagccccgcgcccgccatgccgtccgcgggccccgcctgagctgcggcctccgcgcgcgggcgggcctggggacggcggggccatgcgcgcgctgccctaacgatgccgcccgccgcgcccgcccgcctggcgctggccctgggcctgggcctgtggctcggggcgctggcggggggccccgggcgcggctgcgggccctgcgagcccccctgcctctgcggcccagcgcccggcgccgcctgccgcgtcaactgctcgggccgcgggctgcggacgctcggtcccgcgctgcgcatccccgcggacgccacagcgctagacgtctcccacaacctgctccgggcgctggacgttgggctcctggcgaacctctcggcgctggcagagctggatataagcaacaacaagatttctacgttagaagaaggaatatttgctaatttatttaatttaagtgaaataaacctgagtgggaacccgtttgagtgtgactgtggcctggcgtggctgccgcgatgggcggaggagcagcaggtgcgggtggtgcagcccgaggcagccacgtgtgctgggcctggctccctggctggccagcctctgcttggcatccccttgctggacagtggctgtggtgaggagtatgtcgcctgcctccctgacaacagctcaggcaccgtggcagcagtgtccttttcagctgcccacgaaggcctgcttcagccagaggcctgcagcgccttctgcttctccaccggccagggcctcgcagccctctcggagcagggctggtgcctgtgtggggcggcccagccctccagtgcctcctttgcctgcctgtccctctgctccggccccccgccacctcctgcccccacctgtaggggccccaccctcctccagcacgtcttccctgcctccccaggggccaccctggtggggccccacggacctctggcctctggccagctagcagccttccacatcgctgccccgctccctgtcactgccacacgctgggacttcggagacggctccgccgaggtggatgccgctgggccggctgcctcgcatcgctatgtgctgcctgggcgctatcacgtgacggccgtgctggccctgggggccggctcagccctgctggggacagacgtgcaggtggaagcggcacctgccgccctggagctcgtgtgcccgtcctcggtgcagagtgacgagagccttgacctcagcatccagaaccgcggtggttcaggcctggaggccgcctacagcatcgtggccctgggcgaggagccggcccgagcggtgcacccgctctgcccctcggacacggagatcttccctggcaacgggcactgctaccgcctggtggtggagaaggcggcctggctgcaggcgcaggagcagtgtcaggcctgggccggggccgccctggcaatggtggacagtcccgccgtgcagcgcttcctggtctcccgggtcaccaggagcctagacgtgtggatcggcttctcgactgtgcagggggtggaggtgggcccagcgccgcagggcgaggccttcagcctggagagctgccagaactggctgcccggggagccacacccagccacagccgagcactgcgtccggctcgggcccaccgggtggtgtaacaccgacctgtgctcagcgccgcacagctacgtctgcgagctgcagcccggaggcccagtgcaggatgccgagaacctcctcgtgggagcgcccagtggggacctgcagggacccctgacgcctctggcacagcaggacggcctctcagccccgcacgagcccgtggaggtcatggtattcccgggcctgcgtctgagccgtgaagccttcctcaccacggccgaatttgggacccaggagctccggcggcccgcccagctgcggctgcaggtgtaccggctcctcagcacagcagggaccccggagaacggcagcgagcctgagagcaggtccccggacaacaggacccagctggcccccgcgtgcatgccagggggacgctggtgccctggagccaacatctgcttgccgctggacgcctcctgccacccccaggcctgcgccaatggctgcacgtcagggccagggctacccggggccccctatgcgctatggagagagttcctcttctccgttcccgcggggccccccgcgcagtactcggtcaccctccacggccaggatgtcctcatgctccctggtgacctcgttggcttgcagcacgacgctggccctggcgccctcctgcactgctcgccggctcccggccaccctggtccccaggccccgtacctctccgccaacgcctcgtcatggctgccccacttgccagcccagctggagggcacttgggcctgccctgcctgtgccctgcggctgcttgcagccacggaacagctcaccgtgctgctgggcttgaggcccaaccctggactgcggctgcctgggcgctatgaggtccgggcagaggtgggcaatggcgtgtccaggcacaacctctcctgcagctttgacgtggtctccccagtggctgggctgcgggtcatctaccctgccccccgcgacggccgcctctacgtgcccaccaacggctcagccttggtgctccaggtggactctggtgccaacgccacggccacggctcgctggcctgggggcagtgtcagcgcccgctttgagaatgtctgccctgccctggtggccaccttcgtgcccggctgcccctgggagaccaacgataccctgttctcagtggtagcactgccgtggctcagtgagggggagcacgtggtggacgtggtggtggaaaacagcgccagccgggccaacctcagcctgcgggtgacggcggaggagcccatctgtggcctccgcgccacgcccagccccgaggcccgtgtactgcagggagtcctagtgaggtacagccccgtggtggaggccggctcggacatggtcttccggtggaccatcaacgacaagcagtccctgaccttccagaacgtggtcttcaatgtcatttatcagagcgcggcggtcttcaagctctcactgacggcctccaaccacgtgagcaacgtcaccgtgaactacaacgtaaccgtggagcggatgaacaggatgcagggtctgcaggtctccacagtgccggccgtgctgtcccccaatgccacgctagcactgacggcgggcgtgctggtggactcggccgtggaggtggccttcctgtggacctttggggatggggagcaggccctccaccagttccagcctccgtacaacgagtccttcccggttccagacccctcggtggcccaggtgctggtggagcacaatgtcatgcacacctacgctgccccaggtgagtacctcctgaccgtgctggcatctaatgccttcgagaacctgacgcagcaggtgcctgtgagcgtgcgcgcctccctgccctccgtggctgtgggtgtgagtgacggcgtcctggtggccggccggcccgtcaccttctacccgcacccgctgccctcgcctgggggtgttctttacacgtgggacttcggggacggctcccctgtcctgacccagagccagccggctgccaaccacacctatgcctcgaggggcacctaccacgtgcgcctggaggtcaacaacacggtgagcggtgcggcggcccaggcggatgtgcgcgtctttgaggagctccgcggactcagcgtggacatgagcctggccgtggagcagggcgcccccgtggtggtcagcgccgcggtgcagacgggcgacaacatcacgtggaccttcgacatgggggacggcaccgtgctgtcgggcccggaggcaacagtggagcatgtgtacctgcgggcacagaactgcacagtgaccgtgggtgcggccagccccgccggccacctggcccggagcctgcacgtgctggtcttcgtcctggaggtgctgcgcgttgaacccgccgcctgcatccccacgcagcctgacgcgcggctcacggcctacgtcaccgggaacccggcccactacctcttcgactggaccttcggggatggctcctccaacacgaccgtgcgggggtgcccgacggtgacacacaacttcacgcggagcggcacgttccccctggcgctggtgctgtccagccgcgtgaacagggcgcattacttcaccagcatctgcgtggagccagaggtgggcaacgtcaccctgcagccagagaggcagtttgtgcagctcggggacgaggcctggctggtggcatgtgcctggcccccgttcccctaccgctacacctgggactttggcaccgaggaagccgcccccacccgtgccaggggccctgaggtgacgttcatctaccgagacccaggctcctatcttgtgacagtcaccgcgtccaacaacatctctgctgccaatgactcagccctggtggaggtgcaggagcccgtgctggtcaccagcatcaaggtcaatggctcccttgggctggagctgcagcagccgtacctgttctctgctgtgggccgtgggcgccccgccagctacctgtgggatctgggggacggtgggtggctcgagggtccggaggtcacccacgcttacaacagcacaggtgacttcaccgttagggtggccggctggaatgaggtgagccgcagcgaggcctggctcaatgtgacggtgaagcggcgcgtgcgggggctcgtcgtcaatgcaagccgcacggtggtgcccctgaatgggagcgtgagcttcagcacgtcgctggaggccggcagtgatgtgcgctattcctgggtgctctgtgaccgctgcacgcccatccctgggggtcctaccatctcttacaccttccgctccgtgggcaccttcaatatcatcgtcacggctgagaacgaggtgggctccgcccaggacagcatcttcgtctatgtcctgcagctcatagaggggctgcaggtggtgggcggtggccgctacttccccaccaaccacacggtacagctgcaggccgtggttagggatggcaccaacgtctcctacagctggactgcctggagggacaggggcccggccctggccggcagcggcaaaggcttctcgctcaccgtgctcgaggccggcacctaccatgtgcagctgcgggccaccaacatgctgggcagcgcctgggccgactgcaccatggacttcgtggagcctgtggggtggctgatggtggccgcctccccgaacccagctgccgtcaacacaagcgtcaccctcagtgccgagctggctggtggcagtggtgtcgtatacacttggtccttggaggaggggctgagctgggagacctccgagccatttaccacccatagcttccccacacccggcctgcacttggtcaccatgacggcagggaacccgctgggctcagccaacgccaccgtggaagtggatgtgcaggtgcctgtgagtggcctcagcatcagggccagcgagcccggaggcagcttcgtggcggccgggtcctctgtgcccttttgggggcagctggccacgggcaccaatgtgagctggtgctgggctgtgcccggcggcagcagcaagcgtggccctcatgtcaccatggtcttcccggatgctggcaccttctccatccggctcaatgcctccaacgcagtcagctgggtctcagccacgtacaacctcacggcggaggagcccatcgtgggcctggtgctgtgggccagcagcaaggtggtggcgcccgggcagctggtccattttcagatcctgctggctgccggctcagctgtcaccttccgcctgcaggtcggcggggccaaccccgaggtgctccccgggccccgtttctcccacagcttcccccgcgtcggagaccacgtggtgagcgtgcggggcaaaaaccacgtgagctgggcccaggcgcaggtgcgcatcgtggtgctggaggccgtgagtgggctgcaggtgcccaactgctgcgagcctggcatcgccacgggcactgagaggaacttcacagcccgcgtgcagcgcggctctcgggtcgcctacgcctggtacttctcgctgcagaaggtccagggcgactcgctggtcatcctgtcgggccgcgacgtcacctacacgcccgtggccgcggggctgttggagatccaggtgcgcgccttcaacgccctgggcagtgagaaccgcacgctggtgctggaggttcaggacgccgtccagtatgtggccctgcagagcggcccctgcttcaccaaccgctcggcgcagtttgaggccgccaccagccccagcccccggcgtgtggcctaccactgggactttggggatgggtcgccagggcaggacacagatgagcccagggccgagcactcctacctgaggcctggggactaccgcgtgcaggtgaacgcctccaacctggtgagcttcttcgtggcgcaggccacggtgaccgtccaggtgctggcctgccgggagccggaggtggacgtggtcctgcccctgcaggtgctgatgcggcgatcacagcgcaactacttggaggcccacgttgacctgcgcgactgcgtcacctaccagactgagtaccgctgggaggtgtatcgcaccgccagctgccagcggccggggcgcccagcgcgtgtggccctgcccggcgtggacgtgagccggcctcggctggtgctgccgcggctggcgctgcctgtggggcactactgctttgtgtttgtcgtgtcatttggggacacgccactgacacagagcatccaggccaatgtgacggtggcccccgagcgcctggtgcccatcattgagggtggctcataccgcgtgtggtcagacacacgggacctggtgctggatgggagcgagtcctacgaccccaacctggaggacggcgaccagacgccgctcagtttccactgggcctgtgtggcttcgacacagagggaggctggcgggtgtgcgctgaactttgggccccgcgggagcagcacggtcaccattccacgggagcggctggcggctggcgtggagtacaccttcagcctgaccgtgtggaaggccggccgcaaggaggaggccaccaaccagacggtgctgatccggagtggccgggtgcccattgtgtccttggagtgtgtgtcctgcaaggcacaggccgtgtacgaagtgagccgcagctcctacgtgtacttggagggccgctgcctcaattgcagcagcggctccaagcgagggcggtgggctgcacgtacgttcagcaacaagacgctggtgctggatgagaccaccacatccacgggcagtgcaggcatgcgactggtgctgcggcggggcgtgctgcgggacggcgagggatacaccttcacgctcacggtgctgggccgctctggcgaggaggagggctgcgcctccatccgcctgtcccccaaccgcccgccgctggggggctcttgccgcctcttcccactgggcgctgtgcacgccctcaccaccaaggtgcacttcgaatgcacgggctggcatgacgcggaggatgctggcgccccgctggtgtacgccctgctgctgcggcgctgtcgccagggccactgcgaggagttctgtgtctacaagggcagcctctccagctacggagccgtgctgcccccgggtttcaggccacacttcgaggtgggcctggccgtggtggtgcaggaccagctgggagccgctgtggtcgccctcaacaggtctttggccatcaccctcccagagcccaacggcagcgcaacggggctcacagtctggctgcacgggctcaccgctagtgtgctcccagggctgctgcggcaggccgatccccagcacgtcatcgagtactcgttggccctggtcaccgtgctgaacgagtacgagcgggccctggacgtggcggcagagcccaagcacgagcggcagcaccgagcccagatacgcaagaacatcacggagactctggtgtccctgagggtccacactgtggatgacatccagcagatcgctgctgcgctggcccagtgcatggggcccagcagggagctcgtatgccgctcgtgcctgaagcagacgctgcacaagctggaggccatgatgctcatcctgcaggcagagaccaccgcgggcaccgtgacgcccaccgccatcggagacagcatcctcaacatcacaggagacctcatccacctggccagctcggacgtgcgggcaccacagccctcagagctgggagccgagtcaccatctcggatggtggcgtcccaggcctacaacctgacctctgccctcatgcgcatcctcatgcgctcccgcgtgctcaacgaggagcccctgacgctggcgggcgaggagatcgtggcccagggcaagcgctcggacccgcggagcctgctgtgctatggcggcgccccagggcctggctgccacttctccatccccgaggctttcagcggggccctggccaacctcagtgacgtggtgcagctcatctttctggtggactccaatccctttccctttggctatatcagcaactacaccgtctccaccaaggtggcctcgatggcattccagacacaggccggcgcccagatccccatcgagcggctggcctcagagcgcgccatcaccgtgaaggtgcccaacaactcggactgggctgcccggggccaccgcagctccgccaactccgccaactccgttgtggtccagccccaggcctccgtcggtgctgtggtcaccctggacagcagcaaccctgcggccgggctgcatctgcagctcaactatacgctgctggacggccactacctgtctgaggaacctgagccctacctggcagtctacctacactcggagccccggcccaatgagcacaactgctcggctagcaggaggatccgcccagagtcactccagggtgctgaccaccggccctacaccttcttcatttccccggggagcagagacccagcggggagttaccatctgaacctctccagccacttccgctggtcggcgctgcaggtgtccgtgggcctgtacacgtccctgtgccagtacttcagcgaggaggacatggtgtggcggacagaggggctgctgcccctggaggagacctcgccccgccaggccgtctgcctcacccgccacctcaccgccttcggcgccagcctcttcgtgcccccaagccatgtccgctttgtgtttcctgagccgacagcggatgtaaactacatcgtcatgctgacatgtgctgtgtgcctggtgacctacatggtcatggccgccatcctgcacaagctggaccagttggatgccagccggggccgcgccatccctttctgtgggcagcggggccgcttcaagtacgagatcctcgtcaagacaggctggggccggggctcaggtaccacggcccacgtgggcatcatgctgtatggggtggacagccggagcggccaccggcacctggacggcgacagagccttccaccgcaacagcctggacatcttccggatcgccaccccgcacagcctgggtagcgtgtggaagatccgagtgtggcacgacaacaaagggctcagccctgcctggttcctgcagcacgtcatcgtcagggacctgcagacggcacgcagcgccttcttcctggtcaatgactggctttcggtggagacggaggccaacgggggcctggtggagaaggaggtgctggccgcgagcgacgcagcccttttgcgcttccggcgcctgctggtggctgagctgcagcgtggcttctttgacaagcacatctggctctccatatgggaccggccgcctcgtagccgtttcactcgcatccagagggccacctgctgcgttctcctcatctgcctcttcctgggcgccaacgccgtgtggtacggggctgttggcgactctgcctacagcacggggcatgtgtccaggctgagcccgctgagcgtcgacacagtcgctgttggcctggtgtccagcgtggttgtctatcccgtctacctggccatcctttttctcttccggatgtcccggagcaaggtggctgggagcccgagccccacacctgccgggcagcaggtgctggacatcgacagctgcctggactcgtccgtgctggacagctccttcctcacgttctcaggcctccacgctgaggcctttgttggacagatgaagagtgacttgtttctggatgattctaagagtctggtgtgctggccctccggcgagggaacgctcagttggccggacctgctcagtgacccgtccattgtgggtagcaatctgcggcagctggcacggggccaggcgggccatgggctgggcccagaggaggacggcttctccctggccagcccctactcgcctgccaaatccttctcagcatcagatgaagacctgatccagcaggtccttgccgagggggtcagcagcccagcccctacccaagacacccacatggaaacggacctgctcagcagcctgtccagcactcctggggagaagacagagacgctggcgctgcagaggctgggggagctggggccacccagcccaggcctgaactgggaacagccccaggcagcgaggctgtccaggacaggactggtggagggtctgcggaagcgcctgctgccggcctggtgtgcctccctggcccacgggctcagcctgctcctggtggctgtggctgtggctgtctcagggtgggtgggtgcgagcttccccccgggcgtgagtgttgcgtggctcctgtccagcagcgccagcttcctggcctcattcctcggctgggagccactgaaggtcttgctggaagccctgtacttctcactggtggccaagcggctgcacccggatgaagatgacaccctggtagagagcccggctgtgacgcctgtgagcgcacgtgtgccccgcgtacggccaccccacggctttgcactcttcctggccaaggaagaagcccgcaaggtcaagaggctacatggcatgctgcggagcctcctggtgtacatgctttttctgctggtgaccctgctggccagctatggggatgcctcatgccatgggcacgcctaccgtctgcaaagcgccatcaagcaggagctgcacagccgggccttcctggccatcacgcggtctgaggagctctggccatggatggcccacgtgctgctgccctacgtccacgggaaccagtccagcccagagctggggcccccacggctgcggcaggtgcggctgcaggaagcactctacccagaccctcccggccccagggtccacacgtgctcggccgcaggaggcttcagcaccagcgattacgacgttggctgggagagtcctcacaatggctcggggacgtgggcctattcagcgccggatctgctgggggcatggtcctggggctcctgtgccgtgtatgacagcgggggctacgtgcaggagctgggcctgagcctggaggagagccgcgaccggctgcgcttcctgcagctgcacaactggctggacaacaggagccgcgctgtgttcctggagctcacgcgctacagcccggccgtggggctgcacgccgccgtcacgctgcgcctcgagttcccggcggccggccgcgccctggccgccctcagcgtccgcccctttgcgctgcgccgcctcagcgcgggcctctcgctgcctctgctcacctcggtgtgcctgctgctgttcgccgtgcacttcgccgtggccgaggcccgtacttggcacagggaagggcgctggcgcgtgctgcggctcggagcctgggcgcggtggctgctggtggcgctgacggcggccacggcactggtacgcctcgcccagctgggtgccgctgaccgccagtggacccgtttcgtgcgcggccgcccgcgccgcttcactagcttcgaccaggtggcgcagctgagctccgcagcccgtggcctggcggcctcgctgctcttcctgcttttggtcaaggctgcccagcagctacgcttcgtgcgccagtggtccgtctttggcaagacattatgccgagctctgccagagctcctgggggtcaccttgggcctggtggtgctcggggtagcctacgcccagctggccatcctgctcgtgtcttcctgtgtggactccctctggagcgtggcccaggccctgttggtgctgtgccctgggactgggctctctaccctgtgtcctgccgagtcctggcacctgtcacccctgctgtgtgtggggctctgggcactgcggctgtggggcgccctacggctgggggctgttattctccgctggcgctaccacgccttgcgtggagagctgtaccggccggcctgggagccccaggactacgagatggtggagttgttcctgcgcaggctgcgcctctggatgggcctcagcaaggtcaaggagttccgccacaaagtccgctttgaagggatggagccgctgccctctcgctcctccaggggctccaaggtatccccggatgtgcccccacccagcgctggctccgatgcctcgcacccctccacctcctccagccagctggatgggctgagcgtgagcctgggccggctggggacaaggtgtgagcctgagccctcccgcctccaagccgtgttcgaggccctgctcacccagtttgaccgactcaaccaggccacagaggacgtctaccagctggagcagcagctgcacagcctgcaaggccgcaggagcagccgggcgcccgccggatcttcccgtggcccatccccgggcctgcggccagcactgcccagccgccttgcccgggccagtcggggtgtggacctggccactggccccagcaggacaccccttcgggccaagaacaaggtccaccccagcagcacttagtcctccttcctggcgggggtgggccgtggagtcggagtggacaccgctcagtattactttctgccgctgtcaaggccgagggccaggcagaatggctgcacgtaggttccccagagagcaggcaggggcatctgtctgtctgtgggcttcagcactttaaagaggctgtgtggccaaccaggacccagggtcccctccccagctcccttgggaaggacacagcagtattggacggtttctagcctctgagatgctaatttatttccccgagtcctcaggtacagcgggctgtgcccggccccaccccctgggcagatgtcccccactgctaaggctgctggcttcagggagggttagcctgcaccgccgccaccctgcccctaagttattacctctccagttcctaccgtactccctgcaccgtctcactgtgtgtctcgtgtcagtaatttatatggtgttaaaatgtgtatatttttgtatgtcactattttcactagggctgaggggcctgcgcccagagctggcctcccccaacacctgctgcgcttggtaggtgtggtggcgttatggcagcccggctgctgcttggatgcgagcttggccttgggccggtgctgggggcacagctgtctgccaggcactctcatcaccccagaggccttgtcatcctcccttgccccaggccaggtagcaagagagcagcgcccaggcctgctggcatcaggtctgggcaagtagcaggactaggcatgtcagaggaccccagggtggttagaggaaaagactcctcctgggggctggctcccagggtggaggaaggtgactgtgtgtgtgtgtgtgtgcgcgcgcgcacgcgcgagtgtgctgtatggcccaggcagcctcaaggccctcggagctggctgtgcctgcttctgtgtaccacttctgtgggcatggccgcttctagagcctcgacacccccccaacccccgcaccaagcagacaaagtcaataaaagagctgtctgactgc

SEQ ID NO: 107 - RNA, 10636 nt, Homo sapiens
  source 1..10636: mol_type = mRNA
gaggagagagcagagtataccgcagacatcatttctactacagtggcggagccgtacaggacctgtttcactgcagggggatccaaaacaagccccgtggagcagcagccagagcaacagcagccgcaagacattgtttctctccctctgcccccccttccccacgcaaccccagatccatttacactttacagttttacctcacaaaaactactacaagcaccaagctccctgatggaaaggagcatcgtgcatcaagtcaccagggtggtccattcaagctgcagatttgtttgtcatccttgtacagcaatctcctcctccactgccactacagggaagtgcatcacatgtcagcatactggagcatagtgaaagagtctattttgaagcttcaaacttagtgctgctgcagaccaggaacaagagagaaagagtggatttcagcctgcacggatggtcttgaaacacaaatggtttttggtctaggcgttttacactgagattctccactgccaccctttctactcaagcaaaatcttcgtgaaaagatctgctgcaaggaactgatagcttatggttctccattgtgatgaaagcacatggtacagttttccaaagaaattagaccattttcttcgtgagaaagaaatcgacgtgctgttttcatagggtatttctcacttctctgtgaaaggaagaaagaacacgcctgagcccaagagccctcaggagccctccagagcctgtgggaagtctccatggtgaagtataggctgaggctacctgtgaacagtacgcagtgaatgttcatccagagctgctgttggcggattgtacccacggggagatgattcctcatgaagagcctggatcccctacagaaatcaaatgtgactttccgtttatcagactaaaatcagagccatccagacagtgaaacagtcaccgtggaggggggacggcgaaaaatgaaatccaaccaagagcggagcaacgaatgcctgcctcccaagaagcgcgagatccccgccaccagccggtcctccgaggagaaggcccctaccctgcccagcgacaaccaccgggtggagggcacagcatggctcccgggcaaccctggtggccggggccacgggggcgggaggcatgggccggcagggacctcggtggagcttggtttacaacagggaataggtttacacaaagcattgtccacagggctggactactccccgcccagcgctcccaggtctgtccccgtggccaccacgctgcctgccgcgtacgccaccccgcagccagggaccccggtgtcccccgtgcagtacgctcacctgccgcacaccttccagttcattgggtcctcccaatacagtggaacctatgccagcttcatcccatcacagctgatccccccaaccgccaaccccgtcaccagtgcagtggcctcggccgcaggggccaccactccatcccagcgctcccagctggaggcctattccactctgctggccaacatgggcagtctgagccagacgccgggacacaaggctgagcagcagcagcagcagcagcagcagcagcagcagcagcatcagcatcagcagcagcagcagcagcagcagcagcagcagcagcagcagcacctcagcagggctccggggctcatcaccccggggtcccccccaccagcccagcagaaccagtacgtccacatttccagttctccgcagaacaccggccgcaccgcctctcctccggccatccccgtccacctccacccccaccagacgatgatcccacacacgctcaccctggggcccccctcccaggtcgtcatgcaatacgccgactccggcagccactttgtccctcgggaggccaccaagaaagctgagagcagccggctgcagcaggccatccaggccaaggaggtcctgaacggtgagatggagaagagccggcggtacggggccccgtcctcagccgacctgggcctgggcaaggcaggcggcaagtcggttcctcacccgtacgagtccaggcacgtggtggtccacccgagcccctcagactacagcagtcgtgatccttcgggggtccgggcctctgtgatggtcctgcccaacagcaacacgcccgcagctgacctggaggtgcaacaggccactcatcgtgaagcctccccttctaccctcaacgacaaaagtggcctgcatttagggaagcctggccaccggtcctacgcgctctcaccccacacggtcattcagaccacacacagtgcttcagagccactcccggtgggactgccagccacggccttctacgcagggactcaaccccctgtcatcggctacctgagcggccagcagcaagcaatcacctacgccggcagcctgccccagcacctggtgatccccggcacacagcccctgctcatcccggtcggcagcactgacatggaagcgtcgggggcagccccggccatagtcacgtcatccccccagtttgctgcagtgcctcacacgttcgtcaccaccgcccttcccaagagcgagaacttcaaccctgaggccctggtcacccaggccgcctacccagccatggtgcaggcccagatccacctgcctgtggtgcagtccgtggcctccccggcggcggctccccctacgctgcctccctacttcatgaaaggctccatcatccagttggccaacggggagctaaagaaggtggaagacttaaaaacagaagatttcatccagagtgcagagataagcaacgacctgaagatcgactccagcaccgtagagaggattgaagacagccatagcccgggcgtggccgtgatacagttcgccgtcggggagcaccgagcccaggtcagcgttgaagttttggtagagtatcctttttttgtgtttggacagggctggtcatcctgctgtccggagagaaccagccagctctttgatttgccgtgttccaaactctcagttggggatgtctgcatctcgcttaccctcaagaacctgaagaacggctctgttaaaaagggccagcccgtggatcccgccagcgtcctgctgaagcactcaaaggccgacggcctggcgggcagcagacacaggtatgccgagcaggaaaacggaatcaaccaggggagtgcccagatgctctctgagaatggcgaactgaagtttccagagaaaatgggattgcctgcagcgcccttcctcaccaaaatagaacccagcaagcccgcggcaacgaggaagaggaggtggtcggcgccagagagccgcaaactggagaagtcagaagacgaaccacctttgactcttcctaagccttctctaattcctcaggaggttaagatttgcattgaaggccggtctaatgtaggcaagtagaggcagcgtgggggaaaggaaacgtggctctcccttatcatttgtatccagattactgtactgtaggctaaaataacacagtatttacatgttatcttcttaattttaggtttctgttctaaccttgtcattagagttacagcaggtgtgtcgcaggagactggtgcatatgctttttccacgagtgtctgtcagtgagcgggcgggaggaagggcacagcaggagcggtcagggctccaggcatccccggggaagaaaggaacggggcttcacagtgcctgccttctctagcggcacagaagcagccgggggcgctgactcccgctagtgtcaggagaaaagtcccgtgggaagggtcctgcaggggtgcagggttgcacgcatgtgggggtgcacaggcgctgtggcggcgagtgagggtctctttttctctgcctccctctgcctcactctcttgctatcggcatgggccgggggggttcagagcagtgtcctcctggggttcccacgtgcaaaatcaacatcaggaacccagcttcagggcatcgcggagacgcgtcagatggcagatttggaaagttaaccatttaaaagaacatttttctctccaacatattttacaataaaagcaacttttaattgtatagatatatatttccccctatggggcctgactgcactgatatatattttttttaaagagcaactgccacatgcgggatttcatttctgctttttactagtgcagcgatgtcaccagggtgttgtggtggacagggaagcccctgctgtcatggccccacatggggtaaggggggttgggggtgggggagagggagagagcgaacacccacgctggtttctgtgcagtgttaggaaaaccaatcaggttattgcattgacttcactcccaagaggtagatgcaaactgcccttcagtgagagcaacagaagctcttcacgttgagtttgcgaaatctttttgtctttgaactctagtactgtttatagttcatgactatggacaactcgggtgccactttttttttttttcagattccagtgtgacatgaggaattagattttgaagatgagcatatattactatctttaagcatttaaaaatactgttcacactttattaccaagcatcttggtctctcattcaacaagtactgtatctcactttaaactctttggggaaaaaacaaaaacaaaaaaaactaagttgctttctttttttcaacactgtaactacatttcagctctgcagaattgctgaagagcaagatattgaaagtttcaatgtggtttaaagggatgaatgtgaattatgaactagtatgtgacaataaatgaccaccaagtactacctgacgggaggcacttttcactttgatgtctgagaatcagttcaaggcatatgcagagttggcagagaaactgagagaaaagggatggagaagagaatactcatttttgtccagtgtttttctttttaagatgaacttttaaagaaccttgcgatttgcacatattgagtttataacttgtgtgatattcctgcagtttttatccaataacattgtgggaaaggtttgggggactgaacgagcataaataaatgtagcaaaatttctttctaacctgcctaaactctaggccattttataaggttatgttcctttgaaaattcattttggtctttttaccacatctgtcacaaaaagccaggtcttagcgggctcttagaaactctgagaattttcttcagattcattgagagagttttccataaagacatttatatatgtgagcaagattttttttaaacaattactttattattgttgttattaatgttattttcagaatggcttttttttttctattcaaaatcaaatcgagatttaatgtttggtacaaacccagaaagggtatttcatagtttttaaacctttcattcccagagatccgaaatatcatttgtgggttttgaatgcatctttaaagtgctttaaaaaaaagttttataagtagggagaaatttttaaatattcttacttggatggctgcaactaaactgaacaaatacctgacttttcttttaccccattgaaaatagtactttcttcgtttcacaaattaaaaaaaaaatctggtatcaacccacattttggctgtctagtattcatttacatttagggttcaccaggactaatgatttttataaaccgttttctggggtgtaccaaaaacatttgaataggtttagaatagctagaatagttccttgactttcctcgaatttcattaccctctcagcatgcttgcagagagctgggtgggctcattcttgcagtcatactgcttatttagtgctgtattttttaaacgtttctgttcagagaacttgcttaatcttccatatattctgctcagggcacttgcaattattaggttttgtttttctttttgttttttagcctttgatggtaagaggaatacgggctgccacatagactttgttctcattaatatcactatttacaactcatgtggactcagaaaaacacacaccaccttttggcttacttcgagtattgaattgactggatccactaaaccaacactaagatgggaaaacacacatggtttggagcaataggaacatcatcataatttttgtggttctatttcaggtataggaattataaaataattggttctttctaaacacttgtcccatttcattctcttgcttttttagcatgtgcaatactttctgtgccaatagagtctgaccagtgtgctatatagttaaagctcattcccttttggctttttccttgtttggttgatcttccccattctggccagagcagggctggagggaaggagccaggagggagagagcctcccacctttcccctgctgcggatgctgagtgctggggcggggagccttcaggagccccgtgcgtctgccgccacgttgcagaaagagccagccaaggagacccgggggaggaaccgcagtgtcccctgtcaccacacggaatagtgaatgtggagtgtggagaggaaggaggcagattcatttctaagacgcactctggagccatgtagcctggagtcaacccattttccacggtcttttctgcaagtgggcaggcccctcctcggggtctgtgtccttgagacttggagccctgcctctgagcctggacgggaagtgtggcctgttgtgtgtgtgcgttctgagcgtgttggccagtggctgtggaggggaccacctgccacccacggtcaccactcccttgtggcagctttctcttcaaataggaagaacgcacagagggcaggagcctcctgtttgcagacgttggcgggccccgaggctcccagagcagcctctgtcaccgcttctgtgtagcaaacattaacgatgacaggggtagaaattcttcggtgccgttcagcttacaaggatcagccatgtgcctctgtactatgtccactttgcaatatttaccgacagccgtcttttgttctttctttcctgttttccatttttaaactagtaacagcaggccttttgcgtttacaatggaacacaatcaccaagaaattagtcagggcgaaaagaaaaaaataatactattaataagaaaccaacaaacaagaacctctctttctagggatttctaaatatataaaatgactgttccttagaatgtttaacttaagaattatttcagtttgtctgggccacactggggcagaggggggagggagggatacagagatggatgccacttacctcagatcttttaaagtggaaatccaaattgaattttcatttggactttcaggataattttctatgttggtcaacttttcgttttccctaactcacccagtttagtttgggatgatttgatttctgttgttgttgatcccatttctaacttggaattgtgagcctctatgttttctgttaggtgagtgtgttgggttttttccccccaccaggaagtggcagcatccctccttctcccctaaagggactctgcggaacctttcacacctctttctcagggacggggcaggtgtgtgtgtggtacactgacgtgtccagaagcagcactttgactgctctggagtagggttgtacaatttcaaggaatgtttggatttcctgcatcttgtggattactccttagataccgcatagattgcaatataatgctgcatgttcaagatgaacagtagctcctagtaatcataaaatccactctttgcacagtttgatctttactgaaatatgttgccaaaatttatttttgttgttgtagctctggattttgttttgttttgttttttaaggaaacgattgacaataccctttaacatctgtgactactaaggaaacctatttctttcatagagagaaaaatctccaatgcttttgaagacactaataccgtgctatttcagatatgggtgaggaagcagagctctcggtaccgaaggccgggcttcttgagctgtgttggttgtcatggctactgtttcatgaaccacaagcagctcaacagactggtctgttgccttctgaaaccctttgcacttcaatttgcaccaggtgaaaacagggccagcagactccatggcccaattcggtttcttcggtggtgatgtgaaaggagagaattacactttttttttttttaagtggcgtggaggcctttgcttccacatttgtttttaacccagaatttctgaaatagagaatttaagaacacatcaagtaataaatatacagagaatatacttttttataaagcacatgcatctgctattgtgttgggttggtttcctctcttttccacggacagtgttgtgtttctggcatagggaaactccaaacaacttgcacacctctactccggagctgagatttcttttacatagatgacctcgcttcaaatacgttaccttactgatgataggatcttttcttgtagcactataccttgtgggaatttttttttaaatgtacacctgatttgagaagctgaagaaaacaaaattttgaagcactcactttgaggagtacaggtaatgttttaaaaaattgcacaaaagaaaaatgaatgtcgaaatgattcattcagtgtttgaaagatatggctctgttgaaacaatgagtttcatactttgtttgtaaaaaaaaaaaagcagagaagggttgaaagttacatgtttttttgtatatagaaatttgtcatgtctaaatgatcagatttgtatggttatggcctggaagaattactacgtaaaaggctcttaaactatacctatgcttattgttatttttgttacatatagccctcgtctgagggaggggaactcggtattctgcgatttgagaatactgttcattcctatgctgaaagtacttctctgagctcccttcttagtctaaactcttaagccattgcaacttctttttcttcagagatgatgtttgacattttcagcacttcctgttcctataaacccaaagaatataatcttgaacacgaagtgtttgtaacaagggatccaggctaccaatcaaacaggactcattatggggacaaaaaaaaaaattatttcaccttctttccccccacacctcatttaaatggggggagtaaaaacatgatttcaatgtaaatgcctcattttattttagttttattttgatttttatttaatataaagaggccagaataaatacggagcatcttctcagaatagtattcctgtccaaaaatcaagccggacagtggaaactggacagctgtggggatattaagcacccccacttacaattcttaaattcagaatctcgtcccctcccttctcgttgaaggcaactgttctggtagctaactttctcctgtgtaatggcgggagggaacaccggcttcagtttttcatgtccccatgacttgcatacaaatggttcaactgtattaaaattaagtgcatttggccaataggtagtatctatacaataacaacaatctctaagaatttccataacttttcttatctgaaaggactcaagtcttccactgcagatacattggaggcttcacccacgttttctttccctttagtttgtttgctgtctggatggccaatgagcctgtctccttttctgtggccaatctgaaggccttcgttggaagtgttgtttacagtaatccttaccaagataacatactgtcctccagaataccaagtattaggtgacactagctcaagctgttgtcttcagagcagttaccaagaagctcggtgcacaggttttctctggttcttacaggaaccacctactctttcagttttctggcccaggagtggggtaaatcctttagttagtgcatttgaacttgatacctgtgcattcagttctgtgaatactgccctttttggcggggtttcctcatctccccagcctgaactgctcaactctaaacccaaattagtgtcagccgaaaggaggtttcaagatagtcctgtcagtatttgtggtgaccttcagattagacagtcttcatttccagccagtggagtcctggctccagagccatctctgagactcgtactactggatgttttaatatcagatcattacccaccatatgcctcccacaggccaagggaaaacagacaccagaacttgggttgagggcactaccagactgacatggccagtacagaggagaactagggaaggaatgatgttttgcaccttattgaaaagaaaattttaagtgcatacataatagttaagagcttttattgtgacaggagaacttttttccatatgcgtgcatactctctgtaattccagtgtaaaatattgtacttgcactagcttttttaaacaaatattaaaaaatggaagaattcatattctattttctaatcgtggtgtgtctatttgtaggatacactcgagtctgtttattgaattttatggtccctttctttgatggtgcttgcaggttttctaggtagaaattatttcattattataataaaacaatgtttgattcaaaatttgaacaaaattgttttaaataaattgtctgtataccagtacaagtttattgtttcagtatactcgtactaataaaataacagtgccaattgca

SEQ ID NO: 108 - DNA, 468000 bp, Homo sapiens
  source 1..468000: mol_type = genomic DNA
aatattttgccatctgaaaacaaaatatttcagtactaaaggtaatgagacagtttcatgagtatggtgtttatgttggatcttgcaggaagaaatagttacagattttggtggcagtttatggctttaaacttaatggctaagaaagtaaatgacacatttcttattaattgtttttaccatttgggtaatatacatatttagcttccttgagagaacatttaaattaattgactaactgtaatctgaattatgtgttttaatttaaggttgttaaaatcacgtaaattaactgcttgtgccaacgtaaaattacaatattagcttttttttaactgaaaattatctaaatgtaagatgtctaaaaatagagtggaggtggattggacagtttgcagattatgagttggaataaaaacatcgcagttaagccaaaaacatggcaaccaatattttctgttataaaaatatttgagatgaatttagtttttatgaaagctgtctgaaactgaaatgaatagcagaagctttctgtttattcacagtccagtaataataatacctgcagcacaaagcatacgtcttttctatataaagccaacaagcttctgctcctttctgaagtcgtctttgccaagcagggtgttgggggcgggggtgaggataggggtgaggggacattttacccggttatgctcttacgtactaaccttcaccttgacaaagcttgtcaacgaaaacaaaaccagtcagagccttttcaggaaactgatgttaactgtccactagaggctgtaatgagaccaacaatgtcactttagaccaacccgaggtttaaaccgtaacaataatcgatttttaaatggaaaaaaaaaagttgtagaaatgagtaagagtgaacactagtagttatacttaaatagccacatatatgtgcatggtatttcaaaaatgtgagaaaaaaatatttccggggctctgcaccttcctcgctcgtatgtttatttttatttatgaagcacgtaggctcttgcaggccagagttgtgtaaaaactgacactttttttttggtcatcctgtgccctgcctcagttggtgactaaccgttaggtcataagtaaactcagccaaaagatctctcaaatacagcttacagtcaagattggtggctttcagaaagaaacttacgcgaaaggatcatgtttccagacacttagttctaagcacctgaagaaggtcaaatgtcgcccgacacctaccggccttccagaatcatctgcaacaagaacgccgcactgagcgcccttagtctggaggcgcctcctagtcctccaggtgccacacctgttggcaaggtgcacccatccgaagaagattccttcgcgtggaggtcacacctggcggcgagacaggcggaggggcggggtggtgggagtcggagaccgcactgaaaccctgagtccagatttaagttcctcgtcgattctcgagaactgccatttgatgctccggttgctttctctgtctcctacactggttacctcatttccgattaaattaatgatccgaaattagctgcgagaggagtgcgcgggtctcctttccaggctagagcggagtagttccatatcaaagccgatttccggacctgcgtgcgaagagagaaagagggcagggtcgggcggtcgccagcgttcgccggcaggaaaggtgagggtacctgtgcagtcgggggaccccttgaaactttccggagttgcacgcagaggcaatccccgcggcccccaggcctgggttccggaacgccgaagcgacgccggtttgtggcttaacgtgcagctgatgatcagagtgagccctctcagatgctgctccgagcgcctgggaccaaggacacgtcgggattagaatgggccgacctcccctccccgctggggtgttgcatcggctcccagctgaagcctgacagcccttgggggagtcccccaggttgcctgagtagcgccccgttgtcgttcagtcccctccaactaggtgcagggacccagggaggcgcgcgaggaccgacccgtcaccgctcaaattacctcatcgcccagctccccgcccccttcccaaacctggaaggaaccttgccctccggtccgcgtctcccctcccccgcaccccatcccgagccactctttgggaaaggtgcccgcctccccgggcggcgcgcagcgaagggttaagggcgcgggccggccgccgcgcggtgcgctcgccgtgctctgtgcggctcgccgggccgcccgccagagggtgccccccacccccatgaagtcggatccttgagctgcggcggcggcagccaactgctccatatttggcttctattacacatttacatactggagcgagcgagcgagcgagcgcgagagagcgcgagggagggagggagggcgggcgggcggagggaggagggaggggaggggagcgggaggagggggaggaggaggaggaggaggaggaggagagagcagagtataccgcagacatcatttctactacagtggcggagccgtacaggacctgtttcactgcagggggatccaaaacaagccccgtggagcagcagccagagcaacagcagccgcaagacattgtttctctccctctgcccccccttccccacgcaaccccagatccatttacactttacagtaagtgactatttttttttcctcctccgattctttcccccctcccccattcccttctccccttatttagattaaaatccctcctcccccgatctcccgagaggggcaaaagcaacaaccagcaaacaaacccaaaaccccaatcggctgcacggaaaacagctggaagaggagcgaaggaaatcgacgcgtcgtgttctgtgtgtgtgcgtgtgtgtgtgtgtgtgtgtgtatgtgtgtacatacaaccgtccccggctccaggctcccgggccgacacccccactctgggcgcaggggcggccggcgggggggctgtcaggggctgggtgggcgcccgccgggctagggggcgcgcccgggcggggggcgcgggcggggagagcggcggcggcgccccgctcccccggctgctggtccggtcgcaagtgcggagagccatgtcctcctccctccgggtggcgcaggggggaggcggcggctggggttggggggtggtccctttcccggccgccctcttcccattcctcctccccggagagggcggtgagagagagggggtctcacggagggctggacttctccgcgggtggtcgcccggcctcggcgccctggggcgggggtctcccctcggagggccggcctcgccgggtgtgcggctgcgggcggggaagggactgctcctgcagccgggacgggactttgcgcgcggccgggtgccgggcggggggcgcagaggggtggcctcggggaccgcgcgggggtagcgggtgtgcgggtgcctggagcgcggctggagtggcggtgacggccctggccgccgccgccaccgccgccctgttggtgcggccgcttcctgatcatgtgcagcggcagccgccgcccggagccgggagcccgcgagcgccccagtccgggccggcgcccccgccagcacccgcggcaggagacgaggagccgcggcaggcgctgccctgagccgggagtgaacggctgcgcggctgctgggagggtgaatgaagccaggaggaggggaaggaggaggaggcggcggccgccgcggaggaggcgctgcggggattgggatgcgccctggagccccactgctcgttcactctgggccgggccggagactctgccactcccgggggcgccgccgcctcctcctacgtggttccagtgctgcgcgcaggccggtcccgcagggggcagggaagggggccggacgggcggagcgagaggtgaggcggtgtcggagcgcggcgtgagtgtgagtgagtgtgtgagtgactgtgtgtgtgtatttgtgcgcgcgcgcgccgggcggggggcgagggccgtcgcgacgcggagggggcccttccttggctacttggctgactctgcagcgccccgacccctcttcagccccccgccttcaggctgccttcttaaactccgtggcttgtgctttcattttgtttcagaccacgtagggggctgactgaaagggatgaaacaattcaggttttctagggagattgagcaagaaccttagtgggggtggaagtagggtggtgatcgagactctgccagaaaacaaaacaaaacaaaaaaaaatccgtttctaaggacggcggggattcggttcgagcccgtggctgctctgttttgttttgctttcttggtatataatcctacagataaaagggtaatataaatatttgagaagagggaaattgctgaagagtagtaagggcaaaaaaaaaaaaaaaaaaaaaaaaaaaacagtcggaagaagctggttatataatgcgcgatgtggctaacaagaaaggcaagctatttttattttgtttaccgtatgctgtgcagtagggactcctccaaactggttctgtccccgaagagattcttagcttccctgcgagatccacaggatacaattagcaaaattagaagaccctattacacccacagaataaaaactaatgccttacagtggctttctccctgcacatcctgtcgtgcatgcacgggaatgtgtgtatgcaaataagttctcctttggcaatctagtagtcacatctcaatgacatttgtgttttataatgcaggctgtttttaatatttaaacatcattgttatatattgcacacagcagtgggtagttacttggttatttttaggcacagctagttactttttcaacagtgttagctgagacatttctgtttgggttttttaggaggctgcagttcctagaagccccccttaagcccacccttcggtttatttgatgggtaaaggtagtttgatacttgagctttttttggagtgaagcttatgtctgaggaaaccaccagagagaagagaaaatcctgcacaggaactcttggaaagggattgcaccataacggctagcgctgtggcatttaatctcctctgattgccctctcactgtgcatgcatcagtcaatattttagcagctccgcaaataaatggacttgaatgccatcttctacataaagcagaggttgaagggctcccctgaacctcctggctgcctgtcagtggtgtaggttttcggtgcacttactccagtcctgatcactcatgtaattagatcaggctgccatggcaacagacagtgttcctcgtccattcaggtgggtttgtcttgtgcctgaactactccaagtgttttatgcacagcatttatgctgcccaagccagacgagagactccactatttcaattgcatcttctttcagtcatttggatgggagacactgaatgaggcttctagctactcaacttttataaaggagaccaacaagctgttcttcctaggtgcagtatgtaaatgcatctccccagacagtgaaaggagcctgacaatcctgctggtgtttattgtgaacagatcaacaagtatttggtacttgttagaaacctttcagagctcactaaagcaacatttcttttgcagtctggtgcctttggccttgcagtcagtcacttaaccctttcaagtgtgaagagcgttcatcatttggaacctccattgcccatagcgatggctggatttctaaagggtttactcaggggaataacttattcggaaaatatattcccattgtcacattttaaaacttgacagccatcataacaaaaactggtactgacagtaggcagacattctgaatgtattcattcttaatttggatctattggctgtgatttgaatgatctttggtagtaagttaaaaggatttttttttccttagctaagcgagaaacgatagaggcctatagctagaggactgatagtgcatggtgcttttggacaataaacatgtactttattttaggatgtaatttagtgagcagttagaaagcagtattctagtctttgcattagggcaccactgataaagctggctaagcaaagagaaataatattatggcaaaaaggaaaaaaggaaaagttgctttagttgctgaagctctgtgctgctcaggcaatccaactaagtggggcagggggcgggcgggggggagtattttcataaccctggtatttgaaagaaaagataattgagaattatgtcttgatttagttgtgactgccagtcagtttacaattttatggccaacaaagctaaactggtaaattttttcccccagggctaggattgagagagctactcaactctattcccagggggtttatgagtttttaccgttttgtgagtttatgtggttggtaaattcattgtggcctggtcagatgaagcactgctgtagttaaaatgagctattatttcttctagctactcaacttttataaggtggtaaatagatgggaagcaaggatgtcaatattacacaatgccttggaggtcctggattctattttgcaacatatagaaaaatgctttacttgcagtaaaatgtgaacatatatttttcagtgcacaaataaattcatgtgaaaataagtataaaaaaatgtacctggtgggaaccgccaaaggcaatatttttccttgcggatttcgttttaagagggtttggtaaacagaagtgacactttgtcaaaaatgttacgactagacttcaggacttctgaattgtcttttacacttagaggaagattaaacagaaactctttagccacaagattacatgtcaaatgcctgtaagtttcaacatacctaagtcagttgcctaggagtcctgggaaaggccagtgctgagattattgaaatattagtaaacattactatgactcctgtttttgttgtcattatggagtccaaggacgcacatttctttgaataatgttgtgcctttattgtttttcattctgaaatgtcaagtggattttacttttttgcacataccttgagtgacagtttctgatgactaacactaacactcattttgtttcctattaaaagttaagcaataaacatattttactaaaattctgaaactcacgtaagtaggtaaatgtgggagtgaatgttaattctttaaactgtagttatctgaaaataacacatagattaggatctgaacagcttaaatacttgcatcggtaaagtgacaatagtgaagtaagacaggctattatttttaggggagagatagattatttgactttccttgctctgtattttcagagtaattcaatagttcgaatgattagtttctgtgagagatttagatctgtgcagcttaattgcttcaaataacagatttagttctggtcatacttccaaggttatcagaagcaggccctccttattttgataaaagcattgaaagcaatacattgtagaaatggtaatagaaataataatttctgttttaggaccttacatatagaacttccttttctaagataagaattttaagtcatcaattatgttcacattttattttcatgtaatttagtttaataaaataaatgtactcattcaaaatttttttaagaagtgatatacagtgtcagttttacagaattttttaaatgttggctgaaagaacggtaattacattgagatttttaaaaatatataaatgcttaaaattacagaagtaataaaaagaatggttttagacaaatcttatggaaagttttttattttattcttttataattatatttatggatatttgtctttattagtgtagtaatatattttataacgctcataatttgaactttcaggctaatgtactataaatatttgtattacgcattactaccatcccaaatgtaccaaaacacgtttagagagaacaattatggacaaaaaagcaacaagcattatattttgtttgacatatttcatgttagcagaaatgtttcattgatttttctgtaacttttaatgcatcccatttgtggagtaatgaaaatgtaatgataattgccacaatgtaagcaaaaattgtatcctacctgaaaattactttccagaaaattcatggtagtgtactcagaatttgagactcaagagggcagaggtttccccgattgtgatgttttgatttgggctaagaggaactctttttttttttttttacacttaggtgccctttaacatgacaagttttgaatgagttaggtagcagaagtttttcgtgacagttattgtagctactaacctatagcatctatccttctaacgttcaaagaaaatatatttttctgtcactgtgtatggcaaactttattttcttgtgcccttaattttgttcccctttctcacattatctcctggtacttactgaccattacctcagttttgtttaggccgtctttcttgttaatcttccaatattaatagtattgtattatgttgctctgctgggttttaaaaatattgagtattccatttttggtgtatattattgtataaaatgtcctataaattattttctggtatattattttgtaagtttttgcagtgaatacgtgctgccttgcttgtattcttgccttcttccctctgatggaatacaagttatgtaaactctctgtattatcctaactagtgcagcaacacaaatacttttgaaataagaaagcatactcatgcaagagtaaagtaatcttctatggcatttacatcatgtttgaccctcctctgcacttcagcaaactaggaggaggttgtaacttggactctataaaaccttatctgccaggtgatatgtaaacaggattgtgtgcacacacattgtcatataggcaaacactctcccaactggtgagctcataaaaagcactgtctgtaaatttatggtacctgcacctcatttgagaatcaagtattttgatgcttaatttgagatgacatcatgatcctccctccctgcttcctcatccttaaagaagtactaagattaaatagaattttgtcaacttctacttaacttggccattatttatatttgtaactcaacaggcttcttggtggagggactgtgccttctaaagatctgaaagaccttatagtgtataacagcttaccttccttctctgtacgcacagatcacatgtggggaaaccaaggactacaagaattccttcttttgcatatcagtcctcggcaggcaatcaatgcttaaataaatgcttggtgaatggattagttagaagtaagaacattttggctactgttcattactttgaaaagtgctggaaagaagtggaagttattttcctttccagctgggctgtgctcttaaaaatagtgagtgtgtatggatgaaaataatcatgagtaccgagatgtgttgccatgtacccaaggataattggctcacttacctgtttacggattattcacattggagatcatattcatagctccagaatagtttctttctgacatccaatataaacctgggcctccttcttcctactgttacctggcgtgagcttaggaaacccaaactaagtttaaaatcagcctaagcaaatgtgcagatcagctccagtaatcaaagactgaaaatcagtccagcattcactagtttggggatgattttatagtaaccctgctactgattttaaaaaaatttttttttctgtttaatgtggataattggtaattaccggtatttaagaatataattttaatggatagggctaaaaaaatacgttagcagatcgagtcctcaacttcttccgtttctatgcataggttttacctcacaaaaactactacaagcaccaagctccctgatggaaaggtatatggaagattcattcattctttctttcattcatccattcacacattcactcattcatcatacaatggaaaatttttacttaaccatgtgcaaggaattgtggcaaaatgaaaatgagatgtacattcagtatttaaataaagtttagtggaaagtttagtgaatataaatgcacactttacactttttttctgcattttttcctttcttctattccattggactggtatgctaatagctgtgcactttcatcattgtgtttcaagttgcatgttgatagataatatatgccacattaaaattaggctttggctcaattactattcaatccatgcccattttcacctgatactccttgtagttaccagcatgtgtttatcagatgattggctagaatcattggagaaaagaatgacagcggctggctcaaatggggagaccatcctcttaatttgatggaagggatgacctttttgtatgttggcctccctctgagccttgttgagtaaaaccagacctgccttttgagctggctgggatctgtgtaattctcatacaacagaatgccgaatgtgatgttcttaaaatttgtatttcggtgcatagacacttaaggtggacttattttttaaagcagtctattctgtttttcattttggatttcctctcctgcactccctcgaccattgcaggagcatcgtgcatcaagtcaccagggtggtccattcaagctgcagatttgtttgtcatccttgtacagcaatctcctcctccactgccactacagggaagtgcatcacatgtcaggtgagagttttgcgatgctctctgttttccatctgaggataaagtcctgacctggaaaattgcctcctagccatgctcccttactttgttggctgttgaatatcattttctttgcaaactctgtttgggcatagtgtgggaagttgagaaattgccaagattgttttttaaaacttcgattaaagtatctatctatttggtttaatctatatgttcatgaagactttcatttgactttgcgatgattgataattgccaattggggcttgaacctcatcattttaattgtcagttttccttaatacaattaagaatgctatgctaccagatatcttaagtcacagtttttgcattttagattactgttgtagtataatatgtgcgtagcaaaacagagacctatttgtttaggggaaccagtatttgttgaatcttgaatttctttgtgtctgtttggattttacaacttcctgattttcccacgtacagtaagtttttctggcctggagagtcatgcagacatagggtgtatgcaatggtgatgactcatggttctctattgaagaaagggccagaggatattgcctcaaattaaatcaggaaggaaaaagaggtttgctagaacttggggcagtaagggcttgggaacacaagggtttgagtgtatgtaaccaagggagattgtgaaatagaaaataggggatcaatttctatttgccttggaaatggacctgcttgaaactgtgaagacagactagattagaggttcccaagcctggctaggcaacagaatcacctggagagcttaaaaaaatagaatttggagctccaccctagacttgatgaatcagaatgtttcctgctggaatcattgatctgtctaggcactgatgctccacaggtttgggaacccctgggtcggccggtcttccagcaactcttcctaagttatgttctgtagacttagttggtgagaagctcattctacttttagcaaatctcccatttgaaaatttgaattttcaaaactcatttttcaagaggtagatggatatttgctttataacaggttcatttaaacaataattgaccagatttctttgaagaaagagctgcctctttaccgtaagagccaatttttaagttacatataaattctctggcatcttagataagagcatggagctccgtaatcaacccatctggacttaagatctggagctgccactatgaccttgagtagtcctatgtcctttcaatgcctcagtttattcatgtataagatggaggtaatattagaactttcttatagggctgctgtgaggatggactggagtaaaatagtagatatactgtgggtagaatagtacctggtgtatggtttgtatcttttaacagatgctatcaagtaacttatccctcaacaggttgattgttatggtcatgttttatgatggttgctcctgaaccatacatgactagaaatatgtaaatatacctggaccttggtctttggacccaccctgtagacatctacggctctgcaaagccaaggagccttttatttgtttttgctgaattttaaattctgaatttatcacaactctctgactgatgggatgcatgtgtggtttttttttttttagattgttgtaaaatgaactgatgaattgcatgcataaatgtggttatttgtggtctgagtaaaaataaacaaaaacctgagtgactgaagtattatgcctcaggaaaaacagccaaaaaagtcccagtgggggacaaggtggaggagggaagagtcatcacagacacgatactcttgtaaaatatggaactggattccttacattttattggctgtggattagagaggtgttctttaagtggaaatgtaacctaaagttacatgcaaaggtaagcctcttaagatctacaagtgtcagctgaatgaaaaaggtagggtgggccaggcacagtggctcatgcctttaatcccagcactttgggaggctgaggtgggtgaatcacttgaggtcaggagtttgagaccagcctggccaacatgatgaaatcctgtctctactaaaaatataaaaattagccaggcattgtggcaggttcctgtaatcccagctacttgggacactgaggcaggagaatcgcttgaatcctggaggcagaggttgcagtgagcccaggtctcgccactgcactccagcctgggcgacagagtgagactccatctcaaaaaaaaaaaaaaaaaagagaggaaagaaaagaaaaaggtagagtgtcttactgctactttatctcttagggatgatactcattttaacggttatgtgctaggctgaaaatcctcacatttagatctttggggaaatagtttaattgcaaatgggttgagtacacgtgcattttttttaacctgtggtgttgaaagggagtcatttgtgataacagaaatatctcaagaattttattgtgaaaaaacaggcagcaaaaagtcatatctcttggtcaatatgggcagcttattgagaagagacctaggtttttataatatgttaggcaagtttaagtgtcttatgaatactaaaatactgacgaagtagcgcaaagtcaccttgaattttaagcgctgacattttctatgattgcatttaaagaaagcttataagcattatctaaacattttgcatcaataatggcctcattacagtcctcacgattgacggctcaacgtaggcagaaaaatagtatcattcatgttgtactcttttatattcattcagtttttttcttaaacctacattatagttctttctggttctagttattttataaatatgatacagctatagcaagttatgacctaacttgttcacagtcactatttatgtaaagaaatgattcattcatttattcattgtgaatttttttaaaactactgcatggtgctgtgggaatggaagtgaataagagctaccggaaggcagttattttcttcctggtcaggcaggggaaagaagaaactctctgaaataatgaatacgaatagaatggggttctaacagtgttctaacagtgaaggaattcagaagagtgacgctgagtaggagtgatcaggaaagactttgaggaggagggatcacttgagttgagctctgctgactagattgcatttctgtgggaagagatggatggagcatgaggaaggccatgtgtgtgtctgggacataacaagccaatgcacggtatgtaactgaccaggacattttgactgaagcctaggtgctggtggacatctgaatttctggattcgagcagacagtagagagtatgggaataaaactgccgagaggtcaagtctgaagataaatttggaggagtccttggcataaaagtgatctttgaaattgggttcttgggcctggcaaaaagtttgacacccaggagggggatgactgaattcagggatgacgtcagctggtgtagaatgtgtagagagaaggtaagaggcagcggagagtagcttcaacattgatgtggcatggccttcgtctgccttcttttcatgatctggggtgaaggaggctgggtggctggaggagttgggtgatgtatgcgtgggccataaggactcttctgcagctcaggcaccttggaaactcagtgctgaactacagttcaatgaaatcttgtcaaaacctctcttcctttaagacctttaaaaaaataggaacttgagctaattttagctaaatctaatgtgtgtgtgtataaaaatgaatgctgcgtttgaaattcagcgtatgcggtatctcgttaaacaaatgatccttctattttcctctaaacagttttattaagattttcagtgaagccctgtacgttttaacaacaattccagcatttctttgatcttttctaccgttgatttattcatctcacatgatatgcgtaaatcacaatgtgccatctacttgactctgtagcaattgttcatttgtggcaattcatttactgtactttgataaaccacattaatttgggtgtgttttgtaactttagaggattccctggaggctttctgcagactctttaaaatgtgagatgtgtgtgtttttgtgcgtgcgtgtatactgtatatacctagctactagacacagctctttgaacaatttggcttcccatttatactttatagaaaataaagagatatagaattggtgaatcttgggtctggggagaaagttagtctaagacttcctgatgtaaagtgaaagagaaggctggagatgatgttacgatgatgttagtgagcagtctgatttaatgtaatgagagaaaatttgaggattaagttgtggtttttttttttggtgctgagttagttaggatgggctctctgtgtagcccaaaagggctcagaataaaagcagtgacttatttaactttcatcaaagacaagaaggttaagacaggaacaagagggatggagcaaacaactccaggggcagatcgttcttgtctgcaattatttaatgagcatctaatgtatgagacgcattatgccaacaaggccctctagggaatatggagatgatcaatagttcacatttactattctgcatattaacttattgaatcctcattacagtcctttgaggtaggcatcattattttctccattgcacaggcgaggaaactgtggcacagagagggtgaataatttccccaaggtttcccagctgttaagtgatagaatcgtgcttggatcccagtctacactctcagccctgttccttaagccctgtccttaagaagcttacagtcgagtgcataaggcaaggcatggcttggagtaatatttaaagagccatgacacaggtaacacagtctaggaagtcaggatcaaggaagggtccttccttggagccttctcttttgatgcctgcctgtctgttcagtcacatatgagctttctgacacaggctgtcccatgcaggctttgtggtgttttctccctttctttcactcttactcatatctccttgagattcctatgcactttcaataattattaattgaagaaaatgatgacagtggcaatttgcttatccgtttcaggggattggcttaagttggatccaaatgttattcagcatcaagagtctcagcgagatgatgaacttttgactcttaaaagaacttcactgggtcattgctcagcttgcaagatttggcagatatgaactatttgtctctccagtgtgataggtggtggtgtggcgctgaacgcaagctctaagaataaaacgtgcagcaaaaggaggtcacgctttagtcagggtggccataaggaagcttagaactcacatcccctctgcccctgcctcgcccagtctcattttctctccttcactagaacagtgaatgaatctgagctcattcatgtcaagatgatagagaagaaagatcactttctcttagctggcttagggaaggccagattgtctttcttacactgagtgaaaaattactgaggacttttgttttttttttttttggtcttcaaggcaacatctcttgcttttacagacccacggaaatcgagaagaggatgcaagatttactattcgtgccctagcctggcagcttcagcctacatcacagctgtaatcatatgtgatgcatttttatttacagattagtaggctctgactctgacatatgactaaccgggaagctcctccctgtaacagttgtatgtcgtctgcttcagagaactaattgcttggcaattcccctttggtaattccctctttattttctgatgagttacttaacagcgatgggcttgttgagcagagcgtggagtttaatgtgtgctccagaaactccactgtaggcctgggggatatgtttttcgagttctgtttagctttactgaaggaacagtgaaaccattatatggcctgttaatatttcactcaataccagattaaacaccgagcagcgtgcagttttccaaaagaaatcaaaaccaggcttctttttaaaatgtgcccctgtgcattagaaaattattaaaaaggaatttaatatgtatagaatgtttaatgatcttttgaaaatatggtttcaaatggagtagtcttccaggaccctacagagtgagtatggtgtgctgttggactggtagtttggaggctcagtttctgttgcctgccctgcaacaggatgacttgtgctactcactgtaccttgctgggtctcagttttcctgtctccaaaacacaaggaggttgaaagaaatgatctctcgggactcttctatctctgacattgtacagttccatgaatagattttattgtaattcttgctcccggctcccccaagacctttgcttctgtcaaacatcatttgctgttgtttgactttgttagattttgtatttaattagaatttatattttagctattattatgtcattatttatagagtaagtcataagcggtgcctaaattcatttatcaccccatctatattagtttcatacctgaatacttcctccgctcctttttactgttcttgctaccatgtcccaaacaacatccatttctggaggtggaatgcagtataactggaaagaatctttcagctgattgtgggattattttttgcaagaggagtgcagaagctctgcttttctaagcagtaatatcaagggccatattctgcttttaatttgcaagtagaaatcgttttgatgtcatttggttttacctgcaggtgcaggttttagtctctaggtaattccttttctcttctgcgtcaactttcccaattagtgtgtgcagcattgccttgtctttttggttaattcataagcagttcatacagatgcctcttgattcattgcaattattaatagtttctttaggcagctagtgcaaatagaaaaggtgacatttgagagggtttgttgttttaatttatttgtttcatagacagagagggagggtgaaaatgaaggctttaaagtcagggagattgaggcttgaatccttctggctctggctcctggctttgtggtccaggtcacattccttaaatctgtgatcctcaatttcctcatctgttgaatggggatgataatatcacctaactcacagaatcactggaaagattaaatgtgcactcactctctagatgttgcttatggtagtatctcaataactaataaaaacagacacacacacacacacacacacacacacacacacacacacggaaggcatagcatttaagagctgaataaaaaaagcaagaacaaaggaaagtgctgcatttgaggtatagtcagggtaggaggagcttctcagagcagccagttttagtaggcagagtttgaatctcaaaaggacctttgaaatttgggaaggactaagcaccctccactaacctgtcagtgacgttttctgcaggtagctcttgggaaggactaagcaccctccactaacctggcagtgacgttttccgcaggtagctctgctctacagaaaagagtgtttactacacatgactgataaaaataccatgtttttaaacatgtattgcccaaaccttacaataataaaggaaagccaataaaagcaaaagttccctttgattccaccattccagtccataaatcaagttcatttttatgtgttgttttttagttcttgatgatgtaacttatatctttttttcagttttgtgtttcccatttagcataaacattcttagtaacttcagctatacagttctcatttgcaaggatcacataacattctatcaggttgttttatcttaatttttaagtttcctatcatttttggacattcgagttgtttctaattgtttactgttgtaaagccgcagcgaatgtctttgcacacaagtatttaccgaggacacactcacatcagaaggctcaatactaagttagagggagcttgctctgaattgctttctaaaaggctgtaccaatttacattgttactaatgatataagaatgtctctagcttcaatcttaataattgtgggacttactattttttggctaatttaataggctctttggttttaaagttttcattcctttgatccctctcagagatggaacatttccatctgtgtttatttactaattgttctttttacaattagcaaatggaagtcttgatgttttctaatctatgtatatgagctctttatatgttctagatattaatccatttaaaaagtcctatttgctacagctacttccctagtccagtgtcctttcatttcagtgatgatgctttttgttgtacaacggttcaagtttttatatgatcagcctctcttttcttctacttgtacccagggccaacctggcaggaataaatgagattaccgcagctcaaattctgcaccaggctggcgagtggtccactggatggctttgctgggaatagctctttctttcttctgctcacttttccccttgggaactgtttcctgttgaagtcccagtctttctatttccaagggcccctttccccttctcccacctgcccctcactccttgattctcacccaccctgtgccggtttcctggctgtggcatcctctctgcccagttctcaaccctccgttgctgacctgtgtgtttctcagggagccctgtcctgggagcagtgggtagaaacatgtctggcagcctccctgactagggcctagagagatcagtcaggaatctcaggcctggccaaagtctaaccattatccaagtctctggggtcggggtctttacaacttctgtcttacatttctgctacgtagcaggctgccctgctaaggaatgggctccttggcgctggttttcatccatgtaggaaccagagaggcacgatgctaccctgattcctttcctgttgtagctcttctccggggatagctcttccagtggaaggttgggaacaacttcctagggattgaattttttgaggaaggctggtctcaaagtgtgagttttagctgagtggctctgctgagctggggtggtttggcatatgatatacctcctaaatggcctgtctagatgtattgttgttctggtccaacatgtttttcctctttgaagccaaaatgaacatttgttagtatttgaaatctgctgacatctctgtttttcttaactccctccctgggttctcatggtcctcaggataaagtctagaatccttagcctggctccataggttttgaggaccttccttatctctccagcctcatcactcacatgttgccctgtattcgtcccacgtcggtcccatcgcacttcctccttcaagtgccatactctgttttttgctccagcctttagacatgttgttcttcctccttagaacccagctcctctctctgcactgtctggctacctttccctcattcttgaaatctcagcttagagtctcttcctcacgaagcccttggactagggactatgttatttgctaccttttctgggttcccatagcaccccattcttccccttgtataatacttcacaacccctttcctggcccagcgataggagggactgccctctttccagtatgtggcatctagtgaatgggcaatacatacgggcattccccctgtgatgcttatgttacaaattggatgtgattccatctattaatatggactgtgatgtatataattgtggtgtgtataattgtggtcaggaaccagcatggggtcctgtgaaccacagtggtggaaaaagctatggcacctgtttgttccactggctttgtgctttgtccatcacacagtgagtgaaaaggtgacaaaaatgtgtaagaagcctgtgctaaggagaaagaaaggtccaatgatgaattttctggaaagaaagctgtacgtaatagagtgctgaattcgctcaatcatatttaagttttatagtactgcacttataaccacacaaaacactattattattgaaattcaatacaggaaaaatgcttttgtttttgaacgtctaagactgtcttcctcctcattgaaaaaattcctactgaatttcgattatatgaagatttttagaaatgcagctattgcatcgaatgaataaatgaatttgaggttcacgttcttaacatctgttttctgactttgatcagtctcctttaagtgctctcgtggtcatactctgcaactcaggtgaaagtttctagtgagatagttatcccaaggagatacttttatctggaagagagtagttctgaagttctaagtgaggttggttggttagatttaggttaaggtaccacatggaaaggagaactgcttaaaggggtagggtgaccatgaaaccttcttctgcaaaccctgctcgtcaagtatgaaaccggtggggtaggaggtccatctaatcttatctgtgcccttttgagttggccggccgggtgaccatccatctcctctgggttgtaaatgacttcatctcgaagttgcactgttggtggtaggtgaggacgccttctccaggtggagggagtgcatttgtggttgatggtgtgagcgaccatatgttggaccatatgtcagaacctgttaagagattctgacaggtatggaaatgcctcccattggaaactgaagccctgggtcctttgaccgctgcagcacccccagaggagagtaccctaaggcccttttaaccttgccctgccctggcaggttccaaggggaggcagaaatgactctggatgaattttgttttgattattcttccccttttccaggctctgtgtccagttcacctctggagctgcctgggtcactgcaacccagactagagagaagtatgaccccaagttgtggcttttattgggagacagccttcatctaaggaagtgggaaagaatgtgttccccagctgctgcctttctggtgtctgatctgatacttttcaaaagatagcagttttgtttggtttgatttggattttttttttcttttgtaagtggtcatagacccataagacaagtttattattgtattgacagaagaaaaaaatgccatggttatttatttaaaaatctctttccatacaactttgctttctattgagtttgaaggaaatatggtgatggcatctaagcccaaatttcggtgttttattttggctttcctgttctgtttaagcctctgtaaccccttgaacctttctctactcttcagaaggaacaagttatattttttttccatctcaacatcgtccaaatgaaccgtactattttaacaatctgtgtaaacagatataaaaggaggaagactactttctttaattttcctcccagcgagctgcaaagctgtttcagtcatcctagtgattagcagaatgtgagtaataaacaacattaaaatgaagaaacgtctttctgagtaggaccttgaaatgtgggtctcaccagtagtatatgagccttcctcagactaaactccatgacacagttcatatcatctttaagtcctggagggagggttttttaatatgtgtaaatgaccaaacacagctgttggctgtcctgctgtacagagaacattcggtgacctgaaatcgcaaagtttctgtctctgaagggtgcacttaatttaactttttgccctgaagtctcaagaaatgagacttcctttaaaaaaagtgttcttaaaactttctcattttaaatgtccagggtcttcaaagagtatactgggaggaaagtcctgtgtttcctgtttctcttgtaggactagtcaaaagtaccctttctcttgatggtattctgcagtctgagcctctgatttagtaactacagcctttaaaaccacagttatccagaccatgtgcagtggttaatgtgtcatgagtctgcctcagctgataatagcacatcacagaattcagagtgccttagataaattgtttcagtggatagtcataatgactgcttgagtagaaaagtaccctcattttctaggggagaaaacagaacctacgaggttgactgatttactagattccagtggttagaaatacatgtagcctgtgctgtaaacctgattttctgacttgtagttcagctctcttctccatctccttgtacagccaagataccccagaaattatttgcgtttccgaagttgtaggatgaaaagacatgtctttgcttaactgagttagccccctagaacaatattgagatggagctggaatggtgaagaaatgcaagagtccaatcccttgggtatgtgcaattcccagttaccccttgaaacagtgcttcattataaatttagatgttagaggctgggcatggtggctcatgcctcgaatcccagtgctttgggaggccaaggcggtgggatcgcctgaggctaggagttcaagaccagcctgggccacagagtgagaccctgtctctaaaaaaaataaataaataaataaaaaattatatgttagatgtttttatagtgccggagcctaaacttgatggataaacagagaatgattttcattttgcagccactgcacctttaaagttgagctttttgaggtgtatttcctttaatgcacccatgacagcaaggttgaaaacatcaggaaatcaaattgatctcatatatggaatcttgaaatttaatgtcatctgctctgagaagtccttgtggatgggaagattgtacaatcagatcatttctctgtgtaggtatctgctgtctttctactagatgttacagaagagattagaagaagctcttccagccacctgtgaatcagctttattctgctaggcaagaaggagctggtgctggacatttgtatctgcaaaaaccatgagttacttccccaataattaagtatctactgttacaacatctagtggctaatcttttagtaaaatacactgtccatctcttggtgccagaagcaataactattatgaagccttttctttctttgcagaagtagtttgctggtgaccatattgttagttgcagaaatactcagaatctgattcacatttagacttgacagaagccagattttatatctggaaacctcattagtgaaactgcaaacaagacaaaggccatctatctctctcttaggtgccctcctcaatctctttacagcttttcccccaggagtcaaggagatacagcctggcagggacttttgcttggtgatggagtagctaagaatgtttctctctaacaggtcacagaacagaaagtgctggtggacatctcttcttgccccaagatcttcgttggaagtccccgggacttggtgtctttgccgttcaaagtgtttatgaactcgccaggaggcataatgtgtcaccattttattctgggccaccctaaaggatgacacccagcttcagagacctcctcttggacgacatccctgagaatcaatgttttagctgtcccatagtctgacgtctgtttccgaccgcttttgagctggcgcaggcttagtcattaatggccaggacgatgttaaatgttctgcctgattggcttgcagctacacaccttttgtcatttgcagagcagcaactccctcttgagctcttggggagtctttacacaaatacactagaaaaaaggcacccatccattttttttccatcttggcattagctcacaggcatagtcctgggatgacctggagtagaggcagtggaggataaattcatcttgcacagacttgtttgtgctagttctagcctgtctctcgccacagatctagcttttaaatactcaagtgattggttttgtgtaggaatgtgtggattgttggattggaagaattttctccctggatttctagtgtttacataagcagatacaaaaaaaatttgatcactgatttaaatagcagggcttattttaaaaagttatgggtgcttcaaggtggtacagaataaaaatgtcagggttttttttttttttttttttaacaagtcgtaacacaaccaaaatgtatatattaatgttttgtcaggaaagggtcaaaatggaaaatttgcaacaaagacaaactacaatagaacaagtgcaaacagaagctgacaaatatatgcccctcgttgggagttcagcccatggaatgttatgtaggacaaaaggaatggaagagatatttcagtaacattttgttctctgtcaaaaaccttctgaaatataaatctgctgtgtattggagaatggatacagcaattgattcaagttgaatagctttcatttaactagaatatcccacagaaagcagttcttgttctgacaaccatatttttgctttctttcacttaaagaaaattgaattcatgtttacatatcttatagggttgttttatggacaaagacacgggtcaaaccccatcacagtggctagtgttacaacaaatagaaacatttctaaatgaaataacatttctaagccagggccagtgcctgcagtaataatactaggttggtattatgaagccatttgcaactataaataattcagtcatagatgtgctttttttaaaatcctggttttttaaaattctagtcttttgccaatacacacacccatacacatacttcacctatttgcataatagaggaggaatatgaatatgtatataataaagtcactttattttggactttctgaaacagattaccttttttcttctcctcatgatggctccctgagttgcttccaattgttgaaattccataattacccacaaatatggatgtgcccttctaagggtcttgccatgtcaaccagcccagctgaaagctaatagccagtgttagcggtttaaggaactgagcttcagaattgagagcccccagcaaaggaagttctgtttttattctccatttctactctcctcaaggagaaattaggtgtttattgttttgttttgttttttaaattcccagatcattctggcattggtcctggattcgctgcaaatgtaatttttagcaacatctattactcctgaaatattttggctcttcgtggcctgtatgattcagtagactctgaggttttccaagtacattaaggacttaaatacagaatgtcttaaaattttagggctattgatcaagagaaagcttctcgaggaataaagttctgttaggttttagccctattctgctttcaaaattcttaactggatgccgtctattttgttttctttctgtgtttataactaatttgctacttgggtttattgttttcttacttagaaactacttttttttttgttttgtaaatgcacagcacttaaaaatataaaacagttccaaacagttccaacctgttcattgtttataccttgaccatcttttctgtcttattgctgaaccatcgcttctctttctacttctcttctgggatttcatcttgctcagctaaaattctagtgtgttattctgaatattatggctggagtttcctgaccaacttcttgcatctgagtccatttcctgtgcttaaggctgctggcattccattcactgctcctagtcaaaactgaaacttctcctgctaatgagattaggccttacaacactattaatttcttcctctctatttcttgctccattgttatttctcagagatgaaaatctatttgtcattatgagattcattttggcatcacttactaaagttcccttggatttttctgttcttcatacaccctacagcttcaaactgcaacagtcatcaactggtctttgacaaattagttgtctctacacatggtttacaatattacactagctgtttaaaaataattaagcttctttctgtgttctttgctgtgggtcaggaactttacttcctttgccatgcaacacagaagttaatcacaaatgggtcctctgaaccaaataattaaaaatagagcaaagtttctgaaccaggcggttggcagaaacgtctgtacttccatctgtgcatggttaggaaaatatttcacgatatttaaatagcatcagctttgctctcttttgtgtgagagtgtgtctgtgtgtctatgcgtaattcattgctttgaaggtttgtttgactgttagataatcatataaaaaaagttactggcaaggaaacaggaaagcaaatccaggtgttttgtgcatacattctttatttaccagtctctgtgaaggagcaatgatcttgcttttgcttttctctctgactgaaagtttttgccttgttatgtgctgcagaaaactaaataacattgcattttgactttgaaatctttatgtctcttgattttccacttacaaataacctttgctaatggctttggggagctgttcgtatgtacccgaaatgctgatgaatctatttcagtttgaagtgtggcagattaggaatttctgctctctggaaaggggatttatacctggaatatgcatcaaattcacaaacactttgcgatatacgtgcagacacatgagtgactggttttgacaggaatttaatccttcaattggatttccctttgttcttgtgagtaatcagtatctcataaaatatattcagttttggctaattgtacagctatgatacaactttaagtttctaagatgtaaattactatgtgatataaagataattcccctctagcatttttcttttgtaacagcctctttttactcctgaaaagctctttattttaaggttgatttcattctactaggagaactgttgtgttagataacaactaatgcccaataaatacactgaagggagattaggaactgttaaagaaagaacacaaagcaaatgccttaatttcgttctttcagaacgtatatatttcccaaagttgtcagttcctttatgtttctaaaaacttaccaggtaggcatattcttaatactttgataataaaattaaacactgaaatcaaagctgtagattgaacatgctcacattaagtgaaattaaggagagaggaatacatttcattattaatgtatcagtgaattctggagtttagccatgaatatcagctataatcaataacagtttgagtatttaggcagtttgtaattcatgaaatttaaatcagaagggtctttaaacatctttttgtctaatctcattttgcattcaatttaattctattttttctcagcctactatatgcagagtactatgctagcagggaaaaataatgcggaataagttgtggcccatggtttcaaacagattaatctttgattactctttgatgctttttttgtattatttgagggacagtttttttttcttttttgagatggagtctcgcactgttgcctgggctggagtgcaatggcacgatctcagctcactgcaaccttttaaaaagagttaagtggatcttcctaatgattattctttgtcaatgtaagatattaggacttaatgtattttgtgaactctgagtacacctacaggtgagtggtagatatcttcatactttaaattactgctggattttgtctgtaccccgagacagaattttggtcttctcttatatatagcagttaatattaatgaggcttccctgaaagggttcctggatattcagattcttcacacttttcttataaaccattagatttgtttcctccattcatttgggcatcttctagtgacacacggagtggctcttaaaaaagtggaacttgattgctgatagttttattcaataaatcattgttaataaatatttatttgcgatcagaaacacaaggagggagtgtacacactcagaaaagcccacaatgcagggagcctgttcttctaacaataataatggctggctggcatattgaggatttaggatgtgtcagtcactgtactaatcacttaatcctcacagtaaacctacataggtcattattatctccaccttacagatgaggtaaccgggttagtagcttgcccaaggtcacagagctagtaagtggtgggactgggcttcatgcatgccattttaaccttagaccctgtgcttttaactaattatactctattgcctaccacctgtgtcattgtagaacttgcaaaattatgttcaaaaattgtttttactaaatataaaataaaatacagtaaaatagaaatacaaaagtatattcacaaaataaatgtaaattataaaaaataagggttcagtgaacactcctttaactctacacccatattttaaaattaccatcaactggatgtcctctatgtggacctccccaatcttgtcacattcttcccacctcagaaggaaccactatagaaacatgacgttttaaaatatttttaagactaggcacggtggctcacgtctgtaatcccagcactttgagaggccaaggcaggtggattatttgaggtccatagttcgagaccagcctgaccaacatggtaaaatcctgtctttactaaaatacaaaaattagcacacgcctgtggtccccgctactcaggaggctgaggcaggagaattgcttgaacctgggaggtcgaggctgcagtgagctgagattgcaccactacactccagcctgagcgacagagtgagactccatctcaaaaaagtatacatatatttttcacgaaagtacacaaaaatgcacaccagccagatcactgtttgttttctctcctttttctcttcttttttccctactttttcatctctcatccttcttccttcttttctcgcaccatcatggagaacaaagaagaactgggtcagaacaaacctttaaaaagtgaaggcgagcgttccttgcggggatgcccagtgtcatgactagtgttgggaattcttggtgagatgacaatatttttgcctcactcaaatgaggcatgcccttccaagtaaagcatgctatgttttgtagcaaacagaacacctgagaaggatgatttcatatgactgtgccaacagatctctcacaagcttgtcaggttataattcacaaatcttaactctatagtctatagacattttttttttatatggggtctcactctgtcggttgcctaggctggagtgcagtggtgagatcttggctcactgcaatctccgcctcttgggttcaagcgattctcctgcgtcagcctccggagtggctggggtttcaccatgttggccaggctggttttgaactcctgaccacaagaaatccacctaccttggcctcccaaagtgctgagattacaggcatgagccactccacccagccagtggttctttttcatttgagatggagttttgctcttgttgcccaggctggagtgcaatggcacgatcttggctcactgtaacctctccctcccggattcaagtgattctcctgcctcagcctcccaagtagctgggattacaggcatatgccaccacacccagctaattttgtatttttagtcaagatggggtttctccatgttggtcaagctggtcttgaactcccgacctcggcctcccaaagtaccgggattataggtgtgaaccaccatgcctggcctgtttcttttttttttccaagaggtcagttctcagtctgttgtccgaactggagtgcagtggcatgatcacagctttactgcagccttgaacccttgggctcaagtgatcctcctacctcagcctcccgattagctgggactgccgctgtgcaccaccacacccaactaatttttaaaatttttttgtagagacagggtcttgctatgttgccaaagcttgtctcgaactcttggcctcaagccatcctcccgcctcggcctcccaaagtgttgggattacagacatgagctgccgtgcctggctgacttgtggttcttaatagtgtggctcttaaaatagcaaacatttttgggaaccaatgtgagggcacttcataacacaatcaaaaaccattaagtggaatatgttaagataatgtaaccttgttgttgtcccttaatgctttaatgcaggctttcagcaagtagtaatacctggtatggtgggtgtaaaactcagaatgggtcccggcatggcaggaataagagaattctttcatcggttggaaaatatgtttgaataattcactacatttaaaaaataggtaaagaggcttttggttttggttgcaaattgcactcatccatggaagtttttcaagggccatacaattctgtagatggaggtggcaatttaatgcagtcttagctgtttaggatttagaactatgttacttttaatttacttccatgaaattacaaaaacatgtaatgaagctaaaaagatttcaaaagaagcacatctagtcaaacataaaagtacttaataagggcatacatgtagaagtatattagtctttgcacatatttacatatgtatgttttggttgcttaatatttttcaagtgctgcatgcatttgtatgtgtaaatacagtgtgcaccctttatagaactagtgttgggggactcttttatcagctattatgatttggagctttatcaaatggagtgatttttttttgtgtgtgtgtgagatggagtctcactctgttacccagacttgagtggagtggtgccatctcggcttattgcaacctctgcctcctgagttcaagcaattctcctgcctcagcctccaaagtagctggaattacaggcacccattagcacgcctggttaatttttgtattttcagtagagacggggtttcaccatgttggccaggctggtctcaaactcctgacctcaagtgatccacctgcctcggcctcctaaagtgctgggattacaggcgtgagccaccacacccggccggagtgatattttccaatggtcatgattctggcctgtaacaccaagcagtataacgatgagattgaagtgtgaccatgtgcgtctgcctatttttatgttctatctcatctttttgcttggagaaaaattatgttgaaagactacagtgtgcctataaagcttcaaatatgaaaaaagagctacatatgacactttgttgcagttagtccattgtctcaaaaacatgctataaaaatatgacaactagaaaagtcttggcaaatgtagcatgagtgttgccggtttaaaagccgtgtttgagtactctaaagtacttttctgtgacagctattactataggaattggcaccagctaagaaaatttacagtttaatactttagagcaaataattgcttagggtgctttaaatagcacaggaaatgtgtagagtgtttacttgacatttgctatattgaacactaatactgaaacagattctttgaccacagagaatgccagtgtaggaggggtgggggtaggtgggagaaagaggcggagaaggaaacggcaatacaattagataaaaattaaatgacaaatgtactttttcatgatacagagatatcatggggaaaaatgcccatttgtttgatcaagtaatcttctagtgtggtagcagaaagcaaagtacagacaacttcctgggattaggttcctcctgctaaaggctgtcttcaccagaaggtcaaagccttgcagcccttggtcgctctggtttatttttcaagctcctgaaagcaagaggaatgacctccgtttttattaaaaaaaaaaaaaaaaaaaaaaaaaaaaagaaaagaaaaaaaaagcctctctcgttatctgtctaatctgcacatgcttgtgatttttttttatgacgactctgatgccctcatttctcattgcagctcagtgcttgtgatgtttttttcccctgaatgcatcttgcactcccagaatcttcttttcattcttccctggctctgttaatacgggtcttatcttagaacggggtctagtgcagtttagtgtagctcttacatgcagagcattttttttttgcacaaactgcttctcgtggattgtgattcagttgcacttaaagggaaaaatagagtatattttaggctactaaacctccttccatttgtaggcatttgagccagttatacagtgtctttcagggagttttacatgcatatgttaataaccagtggcacctgtgataggtccaggaatgtgaaattgtgcaacgttaatgacatttgtccaagcttcttccttctatcttgtcaatatgagctacttttaaatacacaaaggaattttgaaaacaccaatcaaaagtcaaaatttcaccctgcagcatggcccggcacccagaacactcagcaagaggaaggtctgtatttatggcttttccactgacttgaaatttgacctggaataaatcatgtttaacttctttatgcttcaattagcttttgaaagatatgtgtggttgtgtttagccagtggaaaggcaataactgaagttcacaacgaaaggagaacttgaagggaaattttgttaggaaagaacagtgggcaagaatacaatcttcaggcagggtgctattcctaaaaagtcttggtacacatggttcctaaggaaggtgggacattttcttataatattctttctgtattttgtagaattaagaaatatattattgtacataaatattttatattacattatatatgtataaatacatttatatatatatatatatatacatactgttttaccctttaactccagaaagctttgcgttcacacatctttttccctaacttctacctataaagggatttttagtgataatcttgaatttaaattgtaatcaagcagtaacaaacttcatttaatatgcagacatctaattttataaaggaaattccaagttattgttcatttccatttattaatttatttattttgggacggagcctcactcactctgttgcccaggctggggtgcaatggcacaatctcacgtcactgtaatgtccatctcccgggttcaggtgattctcctgccccagcctcctgagtagctgtacaggcgtgcaccaccatgcccgactaatttttgtatttttagtagagattgggtttcaccgtgttggtcaggctggtcttgaactcctgacctcaagtgatctgcctgcctcagcctcccaaattgctgggattacaggcgtgcgccatcgcgcttggccaatttttgaagtttctttttttaatctgttgccatctctgagatgagaggtttttcattcatttggggaaaaaggaagaaaggtaatcaacatttattgagcacctactgtgtgccaaacagactgctaagcacttagtccttaagtaccctacgtgactgatgttcagagggccattttctctgtgtcaggaatcaggtgggagggccagaatccatagaacaaaaatataaccgttgcaatagataattaaaaagagggaccttttagttagtggcacccaaagcatcatagtgtgggctgtgagatctcagtaaaccagttgttggtaggttcccccaactcagagacctccatgagggttggatggctggattgcaacatggtgctaaaccacatctccctggttaagccatttcagttattgcctcatttaagttgcattgctgtaaaagacataggtatgacaagttgcaatgcctaaaattcgaacgaaagaatacaggctttgaatgttattcagagcttgactccggagtcccagatgcagtttcagggtgagtaaatacaaagccagcagctcccaagtttagatgagaaaacatttcaaagaaagccagcgaacgcttatatatttaacacaatatccatgactcattttctctttgctctctcagtccagccgttattcatttaccgctcaccccacaggaaagctccttttgaagtctgcctttggctactttgcaaaacatataaatatacaccttgggagaataagggtgagagagaaaaaaggcagaggtcataatttttaatcctggttctgccaataacaaactttgtgaccagatactttgtacagtaaaggaggatgtttttaaaacccattctcagttgccagagaggcaggcagtcatcattctgtaggaagacttgtttcaggatttctcagatgtctgctgtgtttggattgctgaggtccctaaagaaccttccctttgagtcagctcgactaggcttttggaagtagccctggaggtgtgatagcaccttaaaaattcttagtaactaggaataaatagaaggagaatgggaaggaatagaagctgggtgacggggaagggaatgccaagctgtcctgcagctgggatccacacttggtgaaggttgtgcctgcgtccctcatctgtggttgggtataccagaattttgatatctctctagttcgaataccagccttgacatttaccaccttggccaagtccctgaacctatctgtgcctcagtttcttcatctgaagagtggggattatagtcaatgtaaggactaagaaaatcaatatacgtaatacccctagtattcacacttcacctgctatgatgatattaccattctcctttggagttttctaacttatttgtgtagcatttagggcaaaataccaggcatatgggtgatggcgtgtagtggagttggtgagagggagaccttgagttgtagaaagggtgggcagaacctggtttctgtcctacatcccagatgttgcccatacatatcctgtttgtttctgaccaccctgctttgctgtgagggttcccagcccctctgcctttacctgtcctcattctgccccactgtccatgcccagcatgaatctccacttctccgggacggaaagttttccccagctgcttcagcccaaaccaacttccctccccactgccctgtgcgcacagcttatttgatcatgtcatttattgcttcattttgtggcttagatgtcttgcgtcccagtcagactccatgtgactggaggcctttgcctcctttcagctccagggtagtgtggcagaaagagcaaggagcagggagggaagggacctgctctcttctccagccctttctctgtgataaactcagcatgctccaggcgtttaatctctgtaatcctcacagcctcctcatgcaaaatgagggtctagaccaagtgacctctacagctgcccttgcagcttccccattttagagtagtagatggtgaataagtatggcccgaatgaatgaacaaatgtgcagtctcaagttggtcagttgtggcttaaattatttttgtgcccactggcatctcggcttggtaaatggaggaaacggtctctgacgaattttcactttcagtagacagaaattttgttaattttgatcattttatagtccgaatttgtggacacattgaattaatatttatattagtaatatgtctaagaagaaaagattttttatgctaacaaataatataaataatgtcacagactaataacagctaagagtcagtaataaaggaaatttgtttttaagcactttggaagttcctgtttgcatgcattatatgattatatatacataatttgtattacattattatataagctctcttagtctattcattaagtaatttgatgatcattttgaaatttttttataagtacttaagagagttaaaactatatttcttcttgaaacattgtaatttggacttgttttcttattcatattagatgtcttctctgagcccagttactgagtatgtagtaacttttttgtgtgttacaataattgacagagacggtggttcaaattttcagcatcaaacctcactttggaattatttatttccattttttctcttacctactagtatatatggatccaaaattaattgcttttttattatatttaatacatctatttgctttgtggttttactgatacttgaaaattgtaaacaattatgaaagattttgaactttaatcatcttaatttgcttaattaacataatttactagaggagagaaagagaaaacagacttggttacttatttatgtttgtaaccacctttgtatatgtagtaacaccagagcaggcacttcataattgaaaaggctttagggtaataagtcactgtctgtttcaaactgtgatgactttctggaaaaaatagcttttgtaatatttgtcatactggcccagatccagaaagtagtatgttcagtgtctaattgtactccatatggcctgaactcttgagcaatccatctgaagtaggaccctgttaagaaattattctttgtttttttttgagatgaagtttcgctcttgtcgcccaggctggagtgcaatggcatgatcttggctcactgcaacctccacctcccggcttcaagcgattcttctgcctcagcctcctgagtagagtagctgggattacaggcacccagctgttttttgtctttttagtagagatggagtttcaccgtgttggccaggctagtcttgaactcctgacctcaagtgatccacccgcctcggcctcccaaagtgctgggactataggtgtgagctaccgggcccggccaagaaattattctatgtcatacataattgggtgcaagaggtcttagtaatttgcattttaaaatgataattggtatcatctacgaagagaagttctaccttagtgttttagtttagcagtgacactaagatattatacatatgaaaatctcttaatgttagtgggcagaactgggaacccttccctttttttttttttttttgagacagagtcttgctctgccacccagactggagtgcagtgatgcaatcttgactcactgcagcctctgctcccccgggttccagcgattctcttgcctcagccacctgtgtagctgggattacaggcacacgccaccacgcccagctaatttttgtattttagtagagatggggttttgccatgttggccaggctggtcttgaactcctgacctcaggtgatccgcctgccttggcctcccaaagtgctgggattacaggcatgagccactgtgcccggctggaacccctccctcttacagttcacagggtataagaagctactttctagggcttcatcttaatatggtgattgagttctatattatggccaaaaggaaaattatgtgggtattgtggggaggaggagtcagagggctaggggcaaagcgggcagagaaatatcagctgcctttatttagcaaatatttaccagtcgttcctgcccatatgcacttgttccttgtgtacttggatctgaattgattaaaaaggtctgtatgtattgagtcttttcccttaggagcgcttaagctttcttttgatgctttttttctcttcctttaaaatggtgcaggaaaatgttggaataaacatagtcagcttgtgaaaggatgattctctcccttatctgggcataaatattgttgaatgtgagaatgtgggagtagctactgggccaaatatgcacaatgagtgcaagtgattattgaccttactgatgagaggaaggaagagaaatactttaaaactattttcacagggcatttcaaccaagatgtttttctaaattcggtttctgattcaaaaactggatttagctctttttcttgtttgtttcatctgaacaaatttaccctgaattgaatgggagagtgtttcttaatcccccatgtctttagcagtgagtcatttccatgttgttgagacattttctagcctttattgctgtgtgtagttcatgcttttctctggatgttttgactccttaaggaactcgcaataacaaattaacaatcacactcctctggaatgaaaacacgcagtatcggagtaataaatagcagttctcgaaacctaaataaacacagaaaactcagctctcgtacttaagaaggctctagaggagtccagtgtccaacattacaagcaagacacaccatttaaagccataggaagttaacatactttcattttaattttccaagggatcatgttataaaaccatatagccacttccattcttcaaaacttaataaacggttagttttagtcatctgacctgccttctctcaaatggatcataatttagtttaacaggtttgacattaaaataagttgtgtttctctgggaaactcatgttagcctggacttctccacttcctgtctttctctggtgaagctggtaatagtgactgagctcaggccatggcgggatcctcacagccctaagactaggtgccacctgtgtgctgcaacccagtaccaaaataacaggaaaaatctaaagttatccagataaaatatgtcaaattataaagcctctgagtcatgacagtaatcaaacctgattctatatcagcaatcaaacctgactctatatcagctttaccaaacactattaatatatcctataataaaaattaaggcgtcattcctcaggttctttagcaagtaagtcagtgcatctatctaatttgctaaggctgaaacctattgtacatagaactcgggtctgaatggttgtcccgtagaaagttttagagcagagcaaggttgtaaatagccagctccagtggctgtttttcaccctgttcatgggttgcttgccctggttgtatatttagttgcctgtgatggatggagtgaagtgcacaggtcgtctctcaggggtgaacactgggtttgattagaggccattgtcatgaaagatactccagctcttccatgaccatacatgcttagaagaaaactttgatgcacaaagaactgaaagccctaggcactggaattcctgctcatcaaaaagacacctaaaaaattcttttggagacttcatgaattttctctcgattcatactgaaggactggtgccagtaatatttttcctctttgcctgtttcagtttctcatgaagtttttccatatttagacacactgcccagttaaagggaatgccagtcactcggggtttaagacaatgaagtatgtacttccctcaccaatcagttgggagagctgattgggctgaacttccagtctgaggcatgtgagtcacacacaggcagagatttaaatgttattaacatgagaaagatcttttgaacgtgaagtcatcatgcttgaggttactttgaactttcctcatagtctcttttatgatttgtgtaagaatcaacatgctttagtcttatgttaaaaaaacacagtcgagtgaaaatggacatgaatttaaaattgcatgatagccagaaacttttcatactgtggaaatgttacactgtgataaacatttagtgaagctgcttggctcatgggctatttttttaatggcttttgggttcagaaatttcaaaatgtcagattctttgtaatttaaatttccttctaagtaaggaagtgcactatgttattaattttaaaaatatatatacttagaagttgaaattgtgtaattatcttaatgctccagagtctcttttctgactaaacattggaacttattctgttgaatgcagggaatttgtccagaaaagcttaaggaaatttagcctacgaggggaaatgcgctagattcataaataaaaggtttatccaaaggggtgatatagaacatgattttatctataaaagattgtacttgagttttgtctcttcctcctccttttaggattaagtaatgattgtagcttagtttttatagttgatttatagtaataagttatgtgtaagctgactgtgggtagttgaactcatttcaactgcagaaggatagattgttgtttaaaggatcatacaaaaattattattttttaataaaatgaaaatgtccccagagatgttacacctggaaacttaaaagtaggaaaaatgataatatagtatgttactctatctctggaaggaatgatctctcccactgaaaagtaaatagtccaaagtttacaatgtttagttgaaatagcttataaatcacggcagtgacttttaatccttagtagaattctcctttatttctgagaagtctgtataaatgtttatggaaacacagtctgaaatattttaaatgtagcataccaatagtacttaaagagaactttacgcatgatcacacacattcagagttgttgggtaaaaacaccttgtaccttctttggtagaaaatacttctgtatttgcgtgtgtgtgagagagagtgtgtgtgtgttttaaattcttaaacataacagatcttttgaagcagagcagaaaactcgcatgttactgacactgcattctcagccatggggaaagcaacagtgtgtttcagctttagcaaattacatgtgttgactcactaaagaacctgagtaactacacctcagtttttattacaggaaatattaatagtgttttgtaaagccaatagagactcaggtttgattactatcatgactcagagactttataatttgacatattttctctggataattgtagatgtttcctgttattttggattttttattatcgttatttactgtgagttttgcgctcatatacatgtagcccagaaaagcgatagtgagatggttcagtgtatggaatcagttttattgaacaaacagtggggcaggtggggggagatacttttttgtaattagactattattagtgagcacttcctttggcttttgttcatttaaatgtatcttttctttataacttcacaggacgtggaacatgtaaatgcattttgagttgaaagcagaaaatcacatttcagtaaaattaaaagctcaagatttcattttcttgtaaaatttctaatcatccccatttgctgaactttgggccctttcttggcattgggaggtcatggctaatgaatgcatctcctgttgcctggcttacagccgccccctgctgcagtgccatttgggagaagtgtgtaatgtgcgtgcttggactcgttatctcctttcatttcctcaacatcagttaatgctgcatagtttgcaacatgatattgctttgagttggtgcctaattgtgtaggctggctagaagaacgaatctttgcagtggtcaggtgaggccactgagtgtgcccctttgcggccactgcaataaggtggttgggaattcttcatttctgatcactgaacttttccagaacgtcccaaggctcccccaggaactgtattacagcatgacattctgtgtatgtgggtttttctgggagaggattgtagctttcaatcagatcctccaagaattctgtttctcaaaaggttcataggaaccatttatttagaattgaaagataggcacatcttctgaggaaaacaaatgaaaggcttaacaaaatgttaaggctgagttacagaaaacaagccataagctacctattttattcaattaaaaataaccatgacatggccattttgtaaattattacattaaatctgcattgcagacatacctggtacgtatttatttatttattttttaagaggcagggtctccctctatcaccctggctggagtgcagtggcatgatcatagctcactgcagcctcaaatacccgggctcaagcagtcctcttgttccagcctcccgaatatctagaactacaaggacgtgccaccatagctggctcattttcaaattttttgtagagacgaggtctcactatgttgcccaggctggtctcgaactccctggcctcaagcagtcctcccacctcagcctcccaaagtgctgggattataggcatgaacaaccacccccagccacttggtacatatttcaaatgtggtttgtttcttttgaaataatgaaaaggaataatgtttcagggtttgtggcatccacattttgggatggctacatgccgtaaccttgttcgtagtagctcctgatttttatctgtattagaaattgctcggcatgagacaaatgaggaacatttggggaaatgtgtgagtaattgagtaaaaactaatagctgtcttaagggaaccatcttctggtttgcatttgtattaataggtatgcagagcaggaataatttggaacgggggagctggttatcctctgggtgtgtcaagcacaaatctcagattccattacatctgcacaagtcttgacagtttgcaaaatgtgcctagaggtatgcttgataaggacagacatttcttgcctgggttctaactgtgtcactgctagcacagtatctggcctgaacagcatctaaagaaatattttgctggatgggttacctcaatgggttctcatagcagccctgtggatatagacacagcatgttttatcattcttttctacaggctcaaagagggtaattacttactcaggctcacatagctggtaggaaaaggatttaggcctctcctttataccatgctttagctcgacccaaataataaaagcaaaaaagccatgtttggatcaactgagttttaatagaagagcattggagagaggttgtaaaccctcagatattttcaaaaataatagtaagcattcttgacttgcaatgcagagaatgtcttaagctcatatgtcttgatggtgctaatcaagtcaggcttttataattgagtgaaagcacagaaaaataatttattcattcttatacaaccaagtatttattgaatgtcttttctgcaccagacatggttgtatgcactgaggacgtaacagagaacaaacaaggttgtctaagtccctgccctcagagagcttatgttctcatagtggagacaaccacaagtaaattgcataagtagactctatttgcagaccccccaaaatagagtaggatatgttaggagaaagagtgatggcaggggcgaaggggattcttttgtttggtggagtcagggaaagtcttaggggatgggcttttgtacagagactgcagtaaggtataggagccagccctggaagatgggagtggtgaagggtgagatgagaatctgaggatgagcactgtaaaggaagagaatggccaggtgaaggctctgaggccagaaggagcctttgaattgatctagaggctgcaggagcttggattttacgctaaatgtgatgggaaactctgttagttttccagggctgctctaataaattaccagaaacttggtgggttaaaacaacaggaatttgttctctcaaagttctggagggcagacgtctgaaatcaggtgtcagccgggccacactccctcccgaagctctgttgggagaacctttccttgccgctgtcatcctctggtggttccaggcgttccttggcttgtggcagcgtcactccagtctctgcctctgttttcacatggccttctcctctgtgtctgtaccaggtcctctcctgtctcttagaagaacagtggtcattggatttaggacccacccgggaaatccatgacatttatgtcaggggctggaaaaggaaggacaggtgggatgtgaccatccggagagcctatctcagctgtcatgggttgtcacaaaggccattgtgtggttaatttttatcttcttattcttgtttcctctttaatctttcattctaagccctatagccctgactggcagattcgctgtcgggtttttctagttgtagatgacatgctttttcttaaagccatcttcatttattaatctacattcgtttttaattttaatgcaccaatcaataattatttcacttgacagtttttgacagcatgctgcttgcgacatttagctgtttagcatgaattcaaaaggtgatctatcaatttgcacaaatgaaataaagttgctctttcttcctgtgctttgggggaatgtataaaaaaatgtatgtttatccttccctggagaatttttgatgtagaaatactgaatagttttctatataagaagacagaggactaaagagctttaaaatttgttgtgcttattttgcttgtatcataaattcacgtgaaaggccagatttctcttaattgcgttgatattgtggagatgaatcattcaacaaatgtttattaagtgctcattgtgtgcatggcactctgcaaatgttatgggaaataaagacagagtccccgggaaataaagacagagtccccaggaagtctagtagtcagagaaacaaagccacttcccaaattatggtgggtagaaaaacttaggaaatgacagttttatcatgctacataccttcacttaatgaatcctatgtgaaaattcccagtaaaaacctatgaacaaaagtgtgtggttgtcttcatgtatacattgtgtgcacacatctgtgcgtacaatgcacagctttgtatgaagctagctgaaaactaaacagctaggctgaacttagctgaaaactaaacagcaggggaaatgttctttctcactaaaatcacagtgttaaaactcttggcagttcagatggtctccactgtagctgttggtttacattttgataatttaccaaagagcataatatatttaattcctagttggatggtgtaactcaacacagcatttccagcgaaacgctttgcaaatgggaagtaagcattttctttggaaaccagcagcttccttactcccttggttcttctgtgggtataagcatgacctataggttagaagttctggaacagaaggagaaaaatgaattatgtcacagttaacaggaaaggaggtgctttgcattcttgctccgttgcagttagttttgttttccttccttggtttgggggcatttggccttgcatatcctggcaagatttaggcaaaacaggcactgaccttctttctggaatgctctttcattttgccccatgcatattattaagaggcataattcactgtcatatttttgtggctaaaagttttctaacttctatacactgagcctttgttttctgcttaatagggcaaaagagctggcattttctgggcatcattgacccttcactatgatttagattttttaaagaaacacataaactgttcattgcaccttgttgtgtggcaactctgccagtcactaattggtactgtggatatttggctgttgctcttatttactttcctctggtttttacatcacttaattaaatcttgtgccagtttccattctatacatgtatagggaagcaaacagaaactttgtcctgaagcaccaggttctttggcttcatcatcctaaacagctctgtgaaaatcagttgaaagtgagtagagccagaagtggcgtgtaagccatgctgtcagcgagggctggctggatctgcatacgatcgccgccttctgcccctgcttttggagactagagatggcttctggtctgtgtccagggcttgccatgctgattcagagagctatgccacagatgagcctgagttgagaccatgatgccagcatatcctcagacccacgagatcgttatgccagaatgttaatccgcagtggaaaccattactaacatactctcaaggcccacatgatgagcacattctctctctgtgttaagctgcatgggaatgtaaatcctaactggaagctactttattgatgtgccttgagaaattgctgctctctggctgcaggtatcagcagcagtcacagtgcacatgctctctaaggaagatccatatggagtcaggtgtttgcttggtgagcagggaatcggaacaagggagtgggatgagttgactgttaagtggcaccaagcaaacatagcctgcctctctgttcatctcaggagaagggtggcttttctagtgggaccaggaacatgtcagtcattgcctgctactccctacagtcatctcactagggtggccttgcctgtgaagacactgtattctccccaacaaccttggcattgcctacatagactttagtgactctgtactttcctggctaagccagccctggcgcccttttgaggacacagtcttttcttaaattcatgactatatttcatcaggtgctggctggggcaggggtagtggtgatggtagtaattatctttcttcagttggctttgtatgtccatgttctcatccactaaattttgttcttactataaaccgctaactaggcaatctcttccccgttgtcaagttcttggttggggaatggtaatctttattgtccttcttataagtccctttggaatggatagaggctttgggatggacatctcgtgaactgtatcttcatatcaagctctgtgaactgaatggcaacaaggaggcattcatccagaccaggagtaggcaaactatggtccatgggccaaatccagcctgttcttgtaaataaagttttattagcacatagctacatccaataatttgtctaatgtctatagcagtttttgcactacactggcagaatttgatttgagtcatggtgaaagagaccatagtccaagaaagcctgaaatatctactatctgatcctcatcagaaaatgtttgccaactgtagtctatacctttgcacgtcagagaattgcatcagggaagaactagaagccctccttttgcacccccacaaccctgccacaattcagtgaacaaacagaagatcagagagggaatgtgacttgaccaaagtcacacagctggttcataggaaagccaggacctgagctcagatcttccagttcctagtgtatttgtcttctacttttggaggacgttgtgagttttctggtttacagatgattaaccattacaacatactgaaagaaagcttctttagtggtcagagctattttccaaactgacttccccaggcaaaatcactagccagcttggcattgatactcatttattaatcttacaaacagtacctaccatatttcagggatggggctggggctaagacactgatgaagaagcacaatccctgcccttgggaagtttggatgagaagagtggtcagatagctagatacagagatgcatgtcattttatctgtagtgtgttacttatcatcataggactgtgatcatatggacgaaggatgcgttaatttagccttgagtgggtgggggtgttgtcaggaatggctccatagggttggagatgtttgagctctgtctcaaaggagattgagttcttcaggtagagaattgcagcagaaatggctgtggtcctctaggcttgagtgtgcatggtatccagtaatttgggaatgcttgtctaacacaactagaggtagggcttaggggacgtggtatggggttacaggaaatctagttggaaaagtaagttggagccaaactgggaaacttacggcatttcaaatgctaaggagtatggactttggcttatattctaggggttttctaatctgtagattccaaaacatatgggagaccacatttcttgtaaaagaggacctgcacattcataccaacacaaagcatggtctgtagatttggtcatcagaatcactaacagaaataggagctttcttccaaatatatgtagctggctgatattgtaagtcattagccagaattcattcacagcgttactaagttcatagtatctttttgaccattgtacatcttcttgatcaacagatattaagagttaaacatctagtgcctgaagtctgcaacatttttgattgaagaaaatgttgggaaccactgccgttgatggcagtagtcatgaaattttttgaattaacacatgttataggttccagagtcagctgccctaaattttactagctttgtgactttgagcaagttatttaacatacctcagctgtaagagtctttatctctaacgttaaaataatagcctctgtctcttaagattgttataaagatatgataatgtctgaacgcatgtagcatggggccaggctgatgggatatactcatgtttaaatagaagctattgtaatgatttttagcggatgtggcatatgcagatgtattttagatttgacccagtgtggacgatgagttcaaaagggagagttgtacgaccttcctgttatccaagtgagaaataatggggccagggtgggcaggggataggttagggaaggagaggggagagggagtatgggaaggtgtatgtccactttaggtaatgaagtgagaaatgaaagaagccacattctgtttcatgcccaaagcaacagacaaggcacaaattagagtgtagggaagccagtttctgtgacttgatggcatagaatggtgtggcttatctggcaaattccacgccccgtaactcctggaattgatctggataagaattcaccttgagtaaattttaaaaattaatttaataaattaatagccccccctttgaaacacagaaaaattagaattacagcatgagtatctttttttgctctaaaacagtacagcccagcagttcagcctacacccatcacagagctttcaaaggaatgtatacaagaaaatacatatacaattacaaattttaaaaattaagtaacatgtatatactgttaaatatttatatattgatgcttagaaaaagatgggacaaatgttaagtgtcagctgggaggtttttactttcttctttgccatttctgtatttttcaaaatgaatatgtatataattttaaaatgtgttaacactatttcaaaaggaaaacaatcacaaaaaggaatagattggaaaagcttcaggggacttgctatccttgtctttttgggtagctgttctacaaaggcgggtggtggtgggtgcctcccagctgtgtctcatttcagtcagcggatgctctgctaaatctagtgatgggcggcctacctccgaaaggtgggtgggagtgagggatgagtgtagcagtagtacatgcaaatggggccaggttttggtgtgtgtgtgtgtgtgtgtgtgtgtgtgtgtgtgtgtgtgtgtggtgtgtggttttttttttctttctttttttctacagtcttactctgtcgcccaggctggcatggagtggtgtgatcttggctcactgcaacctccgcctcctgggttcaagtgattctctgcctcaacctcccaagtagctgggactagaggtgcacaccaccacgcctggctaatttttgtatttttataaagacgagatttcacatgttggccaggctggtctcaaacttctggcctcatgtgatccacccgctttggcctcccaaagtactgggattataggcatgagttactacgcgcggccagggaccagttaagatttgacgattacattttattgaatgtttgcatcagaggcacctggaaggcttgtttagaccacagatttctgggcgccaggcccaggggttctgatttaatagttctagggtggagcctgagaatatgtatttctgacaaatccctccgtgaaactgatgctgctggccccaggaccacactttaagtgaggggtagtaagcgggtggagaactgcatggaggatgaaaagcatccagttggattttatatttgctcccccttcttcatatacacacactgaaatcactccactctatgttttctcagattctttccctgtctggaatatttggttctctcttcatgttcagtcagtagaaacaagaagtaactcttggattgagcagttttcacacaagtagcccaaatgatattgacacatcatttctacacagcatcagcttgttcacacacatacgcccccagaggccaatggcgtcctttggctttgttctcctttttaaaaattcagtgagtaagctaattttataggaatgtctcagaaagctattcctgtaaacccagcgtttgtaaattgaaatagaggaagcggtgctgattaccgcaattgtattgaaacttattcatggagcggtccctctagattcagatagtttggacagaaaccctccaactcttcccttaccactccattgtttggtaaagtttaatgtgctcacatggcatctactttttcagccagggttaatactcctagcgattctttcactggaagggatgactcagagaggaagagttggcattaattgcttcatcaactatgcttattatgagtcatctcttgcttgtcttagtaattcagctggaaaaaggagaaatgttatctctggttcctgaggccagcttgggcttcagtgaactaggatactccctcgtagccatttgtgagtttcattcagttactaagggaatgaacagattgtgaatctcattatcctagcaggtacatataaatctataaatggcgaatggcagttacttcctgatgtttatcagtgatgagatgccacaggcaggacgttagccctagaaaggcactgttttgaaggtggctgattaaggggcaaaagaaaaaaaaaaaaagcaaaaacggagggatatgttcaggtccctgcctttactcagttccctcccctagcttccaatttgattaacagaggtgtcgagggaggaagagaacaatttccaaataaaactgcctttggttctttttttgagtgtaatgtggtaactggattatttggaaacacgaatttaggtctcttactttctacttcttgcgttcagttcactcgtgtcttcctgtttggtgtataccttccccttctgactcagtcttctctatttctcttctcactgtagcagaccaccgttcttcccctgccttaggcgtttctcacttgctgtctgccttgcgtggctgttttcactcaagcatgttcactgttcctttgtacggaataggggttatccccacagaccctccaggtagaaagtacatctttcttttcactaataaattagtttattattaatagtgaaaagaaagtacatctttcttttcactaataaattagtttctatttagggagaacatacagtgaaatcaacacatcttaagcgtacagcgcaatgagttttgatgaatgcatacatccacataatcagcatcctaatcaagatatgggacatttccatcaccccagagcccctctgcccccttcctgtcaactttccacctccccgtcatcaaccactgctttgatttctgtcactgtaattgaattttgtttgttcttgagcttcatacaaatggaatcagtcagtactttttcgtatctgctttcttttgttcagcatatcatttttgagatcatctgtattgttgcaggtagcaacagttaatttaaaaaatgctagccagaggccaaggcaggcatattgcttgagtctagaagttcgagatcagcctgggcaacatggtgaaaccctgtctctattaaaaatacaaaaactaggcggcagcagtggcacgcacctgtaatcccagatactcaggaggctgaggtgggaggatcacttgagcctgggaggggtcaagcctgcagtgagtcatgatggtgccactgcacttccagcctgggcaacagaatgatgtgtcgcaaaacaaacaatctatatctatatagatatagatggtttttttttttattttgtgaacttacatatatgtgtgtatatatatatgtgtatatatatgtgtatatatatgagttctttatatagtctggatttaagtcatttatcagaaatatgaattttttctcagtgtttggcttacctttttcattttttaaactgtgtttgatgagcccctttaaattttaatgaagtctaatttatcattttttaagatatatgctttttgtgtctttataacatttttgcttaccctgtggttgctaagatgttatcctcctgttttctcctggaagatttctagtttagccttaacatttaagtatatgagccatttcaaattaagatatgaggtgtaggggtcaagattcagtttttattaaaatgtatgaaacaacaattattgaagtgattttttttccttatgaaattgccatcacacctttgtcaaaaatcatttggttttatatgtgttttaagactctctgttccactgatctgcagtctgtacttaggtcaatactatattgtcttgattaaaatactgtcatgggctgggctctatggctcttgcctgtaatcccagcaccttgggaggctgaggtgggaggatcgcttgggcccaggagtttgaggctacagtgactgcagcattgcattccatcctgggcagcagagtgagaccgtgtctctattaaaaataataataataggctgggtgtggtggctcatgcctgtaatcccagtactttgggaggccgaggcagaaagattgcttgagctcaggagtttgagaccagcctgggcagcatagcaaaaccccatctctactaaaaatacaaaaatcagctgggtgaggtggcatgtgcctgtagtcccatctactggtgaggctgaggtgggaggatcgcttgagcccaggaggttgaggctacagtgagctgtgatcatgccactgcactccggcctgggtgactgagctggaccctgtctcaaaaataataacaataaaattcaaaaataatgaataaatgttaaaattaaaaactaaatagctttatggtaaatcttgaaaacagatagcgtgagtcctctctgtcttgttttttccctcaagattattttggtggtgttctatctccttcagagttccatataaatccccctaccccccaaaaaagcctgttagaagttagttcagattgcactgaatcataagagagaaatttaaggaaaattcaccttaacaatattgaaacttcaattcaaaaacacggtatatctttctctgcctttttaatgaatttctgccaggaatgtttccctgtttttcctgcagagacattgcatatctttggtaaaatttaattgtactttatgcttttcgatataatacatgtaatttttaaatcatccttttcaaattatttatataaccaggactttttttctgatcgtacagggaaagtattaactatttcaccactatttcatcatgatgttagctgtaggtttttcatttgccttttattggattgacgaagtttccttctattctcttttttctaagaatttgtgtttgtttgtttttatcgggaatgtgtgttgaattttgtgcagttcatttttgcctctgttgagatgtcatatggttttccgctttatgtggtgaattatattgattggttttaagtgttaaaccaaacttgagttcctgggataagaaccagttataattatgtgttattttgacctattgctggatattttggctaacattttattaagtatttttgcgactatgtttattaagaacattggtctgtaattttgtttctttatataatatttactagggtttagtgttagtgttagtaatactgattatataaaatgtattcgtggagtcctcctgttttttactattttctgaaagaatttatgtaagattttctttcctcttaaaattgatgaaattccacagtgaaatctttgggcttggagttctctttgtgtgaaggttctaagtttttaaaatttaatttaaaaacattataaagtaaaatattcccttttttgatgtacaattctatgcattttaacatgtgtagagttgcataactaccaccacaatcaggatacagaacagttgtatcatcattgtgccaaggattttgatactgaattcaatttcttaacatatagccaactcttcagattttctgtttattcttgctattggtaagttatgctttctatttttcaagaagttttttatttcatccaagttgtgagatttattgacataaagtttttagtaatactttcttcttatctatttagtgtctgtaggatttatagtgatatccccttttccatttttaatgatgttttcatttacttatttttgtgattagttttgctagatgttaattaattttattaagctcttcaaagaatgaactactgtttgctttctgttcttctcattatttccttctttttccctactttggatttaattttccttcctccttcctttctctttttcttttcttttctttttttttttttgagacagagtttcgctctttcacccaggctggagttcagtggcacaatcttggctcactgcaaactctgttccctgggttcaagtgattctcctgcctcagcctcccaagtagctgggattacaggcatgcaccaccgtgcccagctaatttttgtatttttagtagagacagggtttcgccacgttggccaggctggtcttgaactcctgacctcaggtgttccacctgccttggcctcccaaagtgctaggattataggcatgagacaccgtgcctggcttgctttcctttctctatatcactgatttgaacgtcttctttttttttctgttcctaggtacacacacttttaagattgatgtatcttcctaataagtacaccctttaattattatgaaatgaccctttaactctggcaattctccttgtctagaaatctactgatctgaatatggctacaagagctgcaggctgttcagacttcagccgaggtcttgcaatgagcccttatgttttaattgcattgtacaaattttgatatatacttttattgtcacttaactcagtattttgtatttccattttatttcctctgggaattgtctagtagtaaacattttaattcacagacgtggggaatttttaagcttcccttttttccttaattgctaattacatttttatttatttatttctcttcatagttgttgctttaaatatctctgtgccattttgttagatgcatgtatgttgacgattataaaatcatctttattggttgttccttttgccagcctaggatgtccctcaccatcatttataatgcttttaaccttacattccattttgtctgatattcagagtgctatcctggtttttgtttttagttttgcttatattttcttttttaaaaatcttttagttttaatgtcattgtatatgttcattttacacgcatcattcttcccccccaccacatattgtgcatagctctgtacttgtctctgttatttgattagtgactttatacccagttatccttactgtaatcatttttattaagatttttagcttcatttaatgttttctacttggctttactttttgttttgttttgttttgctttcttcctttggatagatcggattttttttcccgaacacattttattttattcttgtagcatttatacctttatttaaacataaacttaggtataaacatagtttcctttatgtctaaaaattatcagtaatttttaagttccccaaatgactcccccactcataaccattggacctcttctctctcagtctgctattttccccagtgttccctctactgagacttaaccaccttctttcctgcaagaattccccatcacatggaaaataactctcagctgcatcaacctctagcctgtgcaacttccccaccttgcttggaaccggaaatgacttctacttttagaaagttcattctctgggcagagtagaagatagaattcattggggtgttattgagacagagagaccatctaggtactcttgaagaagtccaggagactttaggagggtccaggttagagtagtggcagtagagtgggaggactggtggaacaaccgggaggatttggtgttgtatttgaggagtttgagaaaaagagaagttgatggtgccaagtatgagtggcaaatatcagatttcttttattttttcctaccctattctcttccctcccaaattccatttgcatgacttcttaccaaggtttggttctgccattttaaatgaaataagacatgtaaaacacatggtatatgtcctagtatagaaatagtaattaaaaaaaatagatgctagcttccacatttctgtctcaagtgctgactgtatgaatggggaggaggagcctacagattcctgaggaggaacaacttctttttcttggtggcagggtggttagaaatgtaattatttcatttcttcatcttttgaatttgagctgccaatgagacatttaggtgacagaaaattgtatatctaagtctaggattgaaaagagatgatagagattcaatagctgttaggaaaactgtagaagctcgtctagcgggaggtgataaagtgaagagaagagaaatttgaaaagcatttatgggatggattggaagaaggaggatccatcagagaaagttaggaggcctgaattcttgtcccagtctggtttatttagccctgaataaagcacttaaccctctcagggtcctctttctttcttcctttttttttttttttttgagatggagtcttgctctgtcgcccaggctggagcgcaatggtgcaatctcggctccctgcaacttccgcctctgggttcaagcaattctcctgcctcagtctcctgagtagctaggattacaagtgtgcactaccacgcacggaccatttttttgtgtttttagtagagacagggtttcaccttgttggtcaggatggtcttgaactcctgacctcgtgatccacttgcctcggcctcccaaagtgctgggattacaggcataagccactgtgcccggccctctcttcctttaagatctctttctttctctctgcctctcgttctctttctccattcttcattaattcaacaaagatttcttgcatacgtattgggcgccaaattctgctctaggtattgaggctaaagcataagataggatgtggtctttgacctctagtactgggagcaggcaacagattaatcattgctctctgttaagcattatggtagggtatgtttcatacctgagtcaggttgactggaggaaagggtgctgagaaggcctgcagagcacgtccttcagtccaagcttttcagaatgaggagttgttcagacaagcttgggcaaagaaagacaaaagaagtgcaaaatagtattatatggatgggctgaaggagcaataagcagtttggtaggtccatagtgaggcaggcctgacaccgctagaggggctcagggtctcgatcaggaagggcccttgtgagccaagcagagatcttggattttatcttggatgcaatgtagacccattcaaggactgtagggatgtgaaaagtcaggtgtgtgtttcagtgatttcattctgttagtgctatgcatttggcatgataagggaccaggtggtgggcaaggagaccagagaggaagcagttgtagaaatccaggtgacagaggaatgttgaaaattccagaaccacagagcacctgcttcatgctaatcacaggtctgtgtgctgcggcttctgcagggaccaggacagacaggccccttgttctcatggagtttggagtggcaatggaagtgacagaatggaaagaatgagcagattggagagatgttaataagcaaggatttagaggacttgatgagcaattagatattggaagtgaatgagaggggggtagtgtctggtttgaggaagtgaatgggcaaatgacaccactcactgtgattggggaaccaagagaataactgagtgggaccttcagggaaaggtgcccagcctgcacttgtataaataggtctggatctcaggaacggcctccgtgacttactggatcagggaaagaattggactatgtggatgtttacgttacttgattttattctgctccatcattcagtttgggtctgtgactgttgagtcacctcacagaggacgaggtatccttatatctctttccctaaaacctagtgtggggtgagcaaaacagtagggctattgtttgaagtaggtctggaattctgtatcattaatttctttgctcaccctctgatccctgccttcactttagccctcccccaagtcccagcataggctcactacctggattttggcttctgtgtgaactgctgtgggcaatcgtgtcatattcctgtcacagagactctaggatgctccagcgggtagggattttaggatcactgggtccaatctctgcaattacagatgagagaggtgaggcctgaggaggcaagggggcctgcagagcactggtgtagggctacagtgtggtcgcttgattcactggtctgttttgcactgtgccccctccccctcgctgagtgcttagagagcagggcaggaaaagttctgcacattggtgcagacgtttggaaatgactaagcctgtgtgtgtaactttgagacttctcgtgaaggttgtcaagaagcatttgatcacttcagctctgaggtagggagacagtctccttgggcatcacacttgcattccagcagcccccttgtttggggtgctctccaaaggctccccgtaaggaattgtttcaccccgggtgtagaatcacattgcactgcggcttcaaaggaaaagtaaaaaagtgcagaaattaccgaccggagtgtgggaagtacttcttgttggtaagattttcaagtgctggggaagagatgtgttgaaaggacatttactttcatcagcttagagcatctgttttttatactttaaaaagaagcaacacctcaaattatggcagtccctgggcaagtaagcacttgagattttgatctgtacagattcttagagggagcgcctcgcaggagctgttagtagtgatttgtagcacttaactgattctgtagaccgacagtcaatcttggggggaaagggggttcagaggcaatgatagttaaggaactgctccgtaaaacagcaaataagccattgctcttgcacccgagtagaaatggaaactgtacttagcaggctctggagaccaaattagataggaaatgaaaataaattccatgttttttatttttaactcagtgcgcacctccaaaacattcgtacagtgtgggctccatgacgtgttttgcctgctctcttatacagatttaagtttttaaatggtagttagagacactcaacataaaagctgctgctttaaccgttgttgttattgctttgtttttttgagatggaatctcgctcttgttgcctgcactggagtgcagtggtgtgatctcagctcactgcaacctccaccccccaggttcaagcaattctcctggctcaggctcccgggtagctgggattacaggcgtgcgccatcacacccagctagttttgtatttttagtagagacggggtttcactatgttggccagattggtctcgaactcctgacctcaggtgatccacccgcctcggcctcccaaagtgccgggattacagtcgtgagccactgtgcccaacccactttaaccatttttaaatatgcatttcagtggcattaagtacattcaccatagatgtactatttattataggcacagtttcctaaactgagtaaagaaaggaaacatttacccccacagcccagtatagtcattgttaaaattaagatgttagtctccaagtcttttgtttacatgattttgttcaaacctagttgcaatacttttcatagaggttataaagagaaatatagagttataaaggaatttttttaaaattatactttaagttttagggtagatgtgcacaacttgcaggtttgttacatatgtatacatgtgccatgttgttgtactgcacccattaaatcgtcatttacattaggtatatctcctaatgctatccctcccccttccccccaccccacaacaggccctggggtgtggtgttccccttcctgtgcccaagtgttctcattgttcaattcccacctatgagtgagaacatgcggtgtttggttttttgtccttgcgatagtttgctgagaatgatggtttccagcttcatccatgtccctacaaaggacatgaactcatcattttttatggctgcatagtattccctggtgtgtatgtgccacattttcttaatgcagtttatcattgttggacatttgggttggttccaagtctttgctattgtgaatagtgccgcaataaacatacgtgtgcatgtgtctttatagcagcatgatttatactccttttggtatatacccagtaatgggatggctgggtcaaatggtatttctagttctagatccctgaggaatcgccacactgacttccacaatggttgaactagtttacagtcccacaaacagtgtaaaaatgttcctatgtctccacatcctctccagcacctgttgtttcctgactttttaatgattgccattctaactggtgtgagatggtatgtcattgtggttttgatttgcatttctctgatggccagtgatgatgagcattttttgtcttttggctgcataaatgtcttcttttgagaagtgtctattcatatccttcgcccactttttgatggggttgtttgtttttttcttgtaaatttgtttgagttctttgtagattctggatattagccctttgtccgatgagtagattgcaaaaattttctcccattctgtaggttgcctgttcactccgatggtagtttctttggctgtgcagaagctctttagtttaattagatcccatttgacaattttggcttttgttgccattgcttttggtgttttagacatgaagtcgttgcccatgcctatgtcctgaatggtattgcctaggttttcttctagggtttttatggttttaggtctaacatttaagtctttaatccatcttgaattaatttttgtataaggtgtaaggaaggggttcagtttcggctttctacatatggctagccagttttcccagcaccatttattaaatagggaatcctttccccatttcttgtttttgtcaggtttgtcaaagatcggatagttgtagatgtgtggcattatttctgagggctctgttctgttccattggtctatatctctgttttggtaccagtaccatgctgttttgattactgtagccttgtagtatagtttgaagtcaggtagtgtgatgcctccagctttgttcttttggcttaggattgacttggcaatgtgggctcttttttggttccatatgaactttaaagtagttttttccaattctgtgaagaaagtcattggtagcttgatggggatggcattgaatctataaattaccttgggcagtatggccattttgacgatattgcttcttcctttccatgagcatggaatgttcttccatttgtttgtatcctcttttatttcgttgagcagtggtttgtagttctccttgaaggggttcttcacatcccttgtaagttggattcctaggtattttattctctttgaagcagttgtgaataggaggtcactcatgatttggctctctgtttgtctgttagtggtgtataagaatgcttgtgatttttgcacattgattttgtatcctcagactttgctgacgttgcttatcagcttaaggagatttgggctgagacaatggggttttctagatatatgatcatgtcatctgcaaacagggacaatttgacttcctcttttcctaattgaatactctttatttccttctcctgcctgattgccctggccagaacttccaacactatgttgaataggagtggtgagagagggcatccctgtcttgtgtgtaaaggaatttaaagacagcctactccttctccccttctctgccccgtttatagatgaagaagtgaatggccaaaagggttaatggcttgcttagctggacagtggccatgcttgtcccagagcataggtgctccatcgcctgagcgccattccctgggctagtctgttgttagtttcaacatgtgtcataaaaaattcattggtggtttatttttagggtaatcttcttttttcctctgtctctttctttgtgtagtttctgtatctaaacttttttaatggcatcttcaaataggaacttgttttaaaccagaacgtcacaacacgtatgccattcctagggtttatcaccctgatgccaacatcccctcccaaacctcgcttctgttcagatattaccatacccaggaggtcgctgctttttgttttttttttttccatttgttttgctggttcacggttcattccagagtttaaaggtgctaaaaccaaagtttaaaggtgatagtaattgtcccatgttgggtttttagctggtttctttttcttcttaagatctgttttccacttagaaatgaggtgaaaactcacagaagcaaagcctagcagctaaaagcagcacgtctgcttaccacgttacaccctccgggctgatctgcagcccagatcccctttccatcctctacctagctcctcaattcccatcggtgagcagttttcacctcctcctgcccacgtttggaggtctgtgggtggcggttaggaagccaaaggaggctgaagctggggtatattgtttgggtcggccatggcaaccgcggcaggaaaaggaacaggactagttttgtgctgctctgtaaatggccaggattcagcagctatctcaggacttctgcttggccccagacaatctgatctcctggtaaggttattaaacttggctctcctcttccaccctcctttgatcatgttgtcaggcagcgagtaggaatggccgtaaggggtcggctggtgggggttgcagagcacagcaagatatgcaccagcagaaacataagaacaggggcagaggcaaatcagggactgtgttcttatcttttctgcaccccagatgcagagaagtacatccccaagtccttgccaatactattcttcaagagttgagcaccttgctccaaagagcctgtccagatcgccagtttgaccagcatggaggagaacaaggaagggccggtcctggaagaccccaggatttttttaattgggaaagcattatttgagttttctctgctgcaaagcacaaactgcctaccacatgtgtttcataaaaatgtcactgaaaaggagagtgagaatacagagtaagcttccatggcttaataatagtttattttgtgacttggaatagcttttcttttcattcagcggatcattttaggtgtcattcagtttattttaagtagtgtgtttcatcctgagcggattaagaattttattttttaaaactctgtactgtgttgcttcctactgggaaatttacattaaaaaaatgttcgtgagcaaaatctatttggtcaaaaagaatggcccacgattatcactgaatttgggatgtttttcttctaagggacacagttgattcttactcagaatcatgcgagtctgacatttcatttggggaagtctgaggaagttggtgaggtcttacgttaataaaaacaagtgcttctttttcttcttatcacctttcagtgtctgctctgctggctcatgcagtgtaggttggcttacctctccctggaagtcacattgtccttcagaactctttttactatgacccacaaacagttttcagacctcactctgatgagtcaaaggtaaagctgtgaataaacagatggtgaaacaacatttgcagttctctgacttcagtcctccctgaaacccacttggaatctagctctgaattcagccggacatgtttgttcttcccttttcccatcctcacctactcctaaccttcagtgttctctttaccttttatttttatttttgtcattttagtagtaaatgacagggacatagttactcaatttgtaaaacattgaatggtgaggtcaaagattctatgacgagcttgagatttctaacaggttcagatggatgacagcaacattttgctggcttaattttggagctgtttttgtaggttttgaaatgcagtttaatagtgagtaatagagaagtttctttctgccgtggagctactgaacccttgaaagtaacatgctggcacatacagatgaactgtagccccacatttattccttgcttagtggtaagctgtacactgaacaatagaaaacaaaaggctatttttctttggaagagcagatactgatttctggacaaagtttatgttgtacaagttaaacattttttattcttttctggttagattttctgccttttaaaaaattagcttagttgaaaaagcaggtattattaaatacagtttattttattgaattggacggacaatcgtagaattttaaagcttaaatggctttaattgaacctaatgttctaattttacagaggaaacatttgaggcttagtgcggttaaatgaccactcctacaacacacagcctgtttgtttgatggctgaggctgaaaaccagactccagactcctaatttaatgcttttccttcattggtcatgtctttttagcttcagtgaagatcttttttttttttttttttttaatttttgaggttatttaaaaaatactttgccttgaaaatttaacatttccacttaatcattctcatacttcaagaacagtttctctgttaactttctgtttaacttcttaaaccatacactgtggaaattatctgtctatatgctgaacagtctttaatgactgcatgtgtgccgtagctgttgagatgttttaatccactttagcaaaaggtttatttgtttaagaaaagtgcagtgttgtattaagtctaagcttagaacaatgaagcatcatctcccagctactgggagtgagaatgggaggggcagggagtggttggtactatgagctgctctaaagaaaattcatttcagcttcctcacatgttaatacaatcatatttcagtgaagcccttcttcagcaacagtcactaatgatagagtgatgtgtttagacttgaaggttctttaggtgctgtttaaatgaataatgagtgtagttaattcacaatacaggtgaaaagttaaccacagagtagtggcactgctctttctttccccgtcacctctgtgcatgatctcttgctgcgccattagaagggatgattagaatgggcaaatattccctcccggtgctcctggcaataggaaagcactgtgggtgagatatgtctgcagagcagtggtatagtttcaggaagggacctcattctgctctctggggcaaagcttccgggtgcctgagtgggcctcttcctagtcgatggggcagcttgatggggtggctatttattggtgaaaacagtatccatgtcccattggttattgggacttgattcctaatttgaacttaggtgctgtgaagagacttatgtaacgctgtttaatccatgtttggctttgttagaagagtttaaaatactcagaaggaagaaatgtttggttcctttgaaaaggcagactgttcatttagctagggagagcctcaccaaatgagtcaattaaaaacatttggggattaagcccagtgagagtgctgtttttatatgagacatgaagagggtgggggaggggcgggtggaactatggggaaacagcataggaaaaaaaagatctttagaaaaggaaaaagttagccttagctcttcagagagcactgggtgggaaaaaggatttaagtggaaagaagaaaagccctagagatttttgtaccaaaaaaaaaagagtgctgttaaaaagatgaatcaacagctatattctaaatggcgtctccttaactgggatttgaagggaagagaaggcctgagtagagtcttagacaagtccaagggtaaaaaagcaaacagatagttgaagaagtggaaattataagtttggtggcaaaaacttacttgtaattagaatttttgtgtccttaatacttgttgttatgctgatatgataatatgctaataatatgctaaggaattttcccaattcataatctaaagcaaaattaactaatatatgttctgttatggaaattcacctaaattgcaccagcaggtgtattcatcccgctaatactaacactctgttactagctccactgtggcgtttccactgtaacgtggtggtgttggtgctactcattgtgacagtgtggtgtcccaaagagtgagcaagcctcgccaacgcttccttaaaactcttactgatggaactaccatgtttatatagcaagaatattagagaaagaagagtcgagaaaggattccacaacacacatctagtcttttcctctcttagcttttagggtcaacactacctttctcttggaaatgagaaggggagaaaaccttttccactattctgaaaagagggttttaaaaattctctcaggtcgcctaagctggaggggctttatgacagcactaaccagtaggtcaaaaaggaaatttattttttcccatcataggttcctctctacacagagaatgcaaaaccgtaattcttaagagttcctcaatgattattcacttttgttcttacttccatatttctctagtaaagatttaaatatttaattttgtagactcctgaaataactgcttccagatagtatatttactcagaatattatttaaatgcattaatgctgacattgttagaaaggggagaaaactcaacattttccggcagaaatcattgtaaaatgtattataaaatttcctcccttcctaagtagagtgctactatatagtgaatataatttaactttttttcttggagacttattgtcatttctgtgaagttattacctcgacatagtagcgtcctgatgcctcaaaagctcataattcttctcgatgccacagcctctgtcctatctacttgtcttggttgtcatgtcttcaatctcctttcatatttgcctatatctgtaaacttaagagaaaccagataatcaatctgataaaatcactaagctgaatcatatacattaattctcattcctagctctctccacctagccagtgtggcctgaggcattcatagccatgttctgagtggtgaaggctaagagagcccaggagagctgtccagggttaaataagacattaatatataaagtaaggactgtcggtatacgtgatatttatatgttatcatattacattttatttatttatttattcatttatttatttgtatatatagagagagaaacagagtctcactctgttgcccaggccagagggtagtggtgccatcatagctcactgtagtgtcgaactcctgggctccagtgatcctcccgcctcagcctgctgagtagctaggactacagacttgtgcgaccacacttattttttgtttttaatttattttttgtaaagacagggtctcattccattgcccaggctgcatttttaagtttagtaactgcccaaatggacattgggtaaaataaaaataaatacagtcacttctcttcttaaatcattcacctctcaagatgaaggtactaataggacattttctagaacttcagtgttaaccacagcaaggaggaaagacaggcctgttagatgtagactaagaacttcagaagctgtctccgtcctaggctgggcccagggctctagaattgtcccacacacctggtgggcttgcttgggtacttgggtggtacctgggagatgatgacctgttcatcttcagcttctgttattccaggaaacagaggtagtcatctggatactacaggtttgccagctctgctacttctgcttctactgcaggaggaggagctatggaatttttatgcatgcatcaaaacactgacttggctcataagactgcttaaaagacagagtgataaattacgccttgtttctcatgaaacagatttttcccaaaagtagaaatactaatttataatgtatccttttcagaaagattgtaagtctaagtttctcagagaaacagtgtatgtgatggcaggaccccagtaaagtccaaaatatcccataatggccttaggaccatgcccatcatagtctccatagagccatggtccccaagagccatggtgcccaagagccaccacttcagtgggtggtaggtggttgtgaagaatggtcactgtggttcacagaataacagtgacaattgtgaatagaagccagtcattacctaactgataaaatgagtgaggctagcaaagggcctgacaggaagtgaaatcacttactgaagtggtggtagagtacgcaaccaagaactaagaacaggagggaagttaaccctagggagagttcgactccacttgaggaggaacattctggcaatcaggactgtctaaaaatggaacaagctgattgatttagcagtgaaacctctgtcactggagatgttcaaacagaggtagtaggaccctcttatcaggaattctccagagaggagatgtgagttggatagaaggttattgtagacgaccacttgtttctctctcagctctgaaatgtagtccttaaggctgacgtgtgtttcccagtttctaatcggaaaagataacataatctacagtgttgaaataatttaaacaaagtaaataactgtgcttttacaaccataatacggtttagcctttcattattttgttacgttcctcattaacatagacataatttcttttaaagaagggacaattgtgacgagcctgggcaacatggtgaaaccccacctccactaaaatacaaaaaattagctgggcgtggtggcacacacctgtaatcccagctacttgggaggctgaggcaggagagttgctagaaccaggaggcggcggagcttgcagtgagccaagatcacaccactgcactccagcctggcgacagagcgagactccgtctcttaaaaaaaaaaaaaaaagaaaaaaaaaaaagaagtgacaaaacttacccagtaaactaaatgttaatttcctcttctcaggagcataatactaacttactcctctgtttttatatttttgagtactgataatcggatagtgatatatttgtgttattttttgttcaaacaattgaattcattcttagcaagaacaaaagtctatttgaaacatgtaggcatcttaggtagattaaatttttcattgtttcaagttttgacttttgtatttctgcacattagtgatccttgaagattaggcaaggccaagttcttttgacttttataattagtgtgtcggaatcccagtttttcctaccctagggtggactgtattttttacaattaactctgtgaagggtgactgggggtggactggtgaggagaggcttccagttaccagagagcctgtgacttactctctgtgcttttcctaggtcaccaattttcaaagaatttgagtataattaaatacacttcataataaactaggctgaacataatttaatctttccctgaaggtacttcagagtcttggagtgctttagggccatgatgagcatcaattatgttctcacggtgggtgtgcagaaggaggtagttaatagagttctgtttgatcaagtcctgggtgactggacatgtgttctgttatgattagcagttcagtgtccaggttttggaactgatgcttagtattaaattctcaggcaggagagaatggaatagagattgacctctttggctttgagaggctgaaagttgatgacgataattcacatgtacatggtatatatagcactttttagcttccaaagccctttcacataccttgtcttccattgcttgtttcttgtgatgttctggaaaggaagcaaggccgctggtatcccatttttacagatgaggacagtggagctcaggaagcttgagggacttgcctaagctcatacagtagatcaatggcggagaccactggacttcaaattcagtgctctttttagtatttcaaaggatactaaacatttgctcacatctctgatgttctttgtgctgtatgtgtagtaactcatttaatcctcacagtggccctgttagtaggtagatatcagttcttctggtactattacgattctcatcttcagagctgaggccactgagaggcacagagaagttagggcatgcactagtgagtggcggagctgaaatctgaacttagagctttggctccagagcccatgcactccaccattatgctacatggctactcagtgtacagatacactgagcttaagtagaggagaaagcttatctatccatatcttcccatctgcaaagacctctgcctgtatgggaggtctgggctcgttctgactaaggttttgaacccagatctgccaatttgagatcttgggcccattacttagcctgagcttcagtttccacatctctaaagtgaaaatatagaacatggaatgtacctgtaagaacacaatggaatacaggtaaagtgcccagcacactgcttattccttagccttcatgttttagaaagtggttgctattgtttttgttgttggtggtggcggtagtggtcttcttcttattattatttatatatttacaatggccaaaattatatgaaatgttttccaaaaattaggtatttgtacccttcatatgaatgtgtgtgttaattgggtataattgtctttcttgagtctttaaaatagacaaatcttttgattacatttgttaatattattgtacctacctatatctgacttgacttacaattttacttcattaaatacatagcaagtcatctgagaacccaaagtaatcatacagattacttgccatatagttaatttgtgactgtgatatggctgctaaggtagaggtttgaatttaaaagcacaaagaaaaatgtttacttcaatggttacaaatagattaatcatataaagtacatatttgcagagtctcgctcagtcgcccaggctggagtgcagtggcatgatctcggctcactgcaacctccgcctcccaggttcaagcaattctactgtctcagcctcctgagtagctgggactacaggtgcgtgccaccacgcccggtgtatttttagtagagatgaggtttcaccatattggccaggctggtctcgaactcctgatgtcaggtgatctgcccgcctcggcctcccaaagtgctgggattacaggcttgagccaccacacccggcctattctaaggcttgttctaaggctcacagatggcaccttctctgtgtatcctcacatggtggaagaggcaaagcagttcctgggggagttctttgataaaggtgctaattccattcaagagggcacctcccaagggctccactccctaatactatcacgtggggagttaggattcgacatgtgaattttggaggcacacagacattcaggccaaggcataaacagtgaccacttttgttctgtctgtccacacactgcctagagcttccatttatttcaactacatttgcttttttcttatttatctgttcagagtatcttctcagtggctatttatttaccaccctttaacatgttttcttgacattgtacttcagcctgtatatgctttgcaactcaggaactatgctggcttaactaatagtacctacttaacaggtgaaactgacagtaacagcttaataggtgctttccatttttaacatacctcagctttttataaatacaaaaaactctcaatcttttaatgtggttttaaattttaaacaggtcttctttcattttcctttacagaaaactgtaatactgcatatgcattttcaaactatgcatatttcttcttcattccatgtggaagtttttattcagcctttcagtaaattttacttagcttgtcccatggatgccgtaggtgtaaggaatatgatagtgaacaagacagacagagctcctcccctcagggagctttgccatgatacacgatgatgacaatgataaaaggagcaaataatgatttgggacctgattccaaagggatatttctgcgacacttacaatgaaattccaacctggcaccatctttttcactgcagaatgcatgaaggtggttgcatcatgtcatttcgacatgcatttaaatgtaatgaaaggcacaagtagtgattgcaaacactacaataagttgcttgttgactctcttactgtcttccttcttatctccctttcttcctttgtctcattctcagttttcagagcttagtcattatttcgtaatcctctcctaaaatgaaatctggggctctaaggacaggaggcacaggttgtgtttgaacagcatcatcgtgctttatgaaggggattggaggggagattctgccccacagtatggtcaggtctcgctccaggcagcactgactacattggtgctggttgggtaactgtggctcggcaggtcactctccctctttccacctccgttttctcattattagtagaagtcgaaatagcatggttttctaaggcctctgccaatctacaattctgtgattcatatgttcctaaacacttgagttactttttctcaataaatggaaatatattttccaatgaggctggaaatacattttccaattatcctctcccctggtttataacatatcatcaatgtgttgggacttctaacactgcttctgctgtaagcccatcaagaggttaattacctttgaagaatgaggaactgctggaaaagaactgtaaaaccttcaagagaactttggagttaatccctctggtaataggaatcaatgtcactcacacatctagttgccagtggaggaggaataacagcactgggccaagtagacttgaaggaaggcaggttgctgatagagtggagagctgaagattctgaatcaagctcatcatgactctcttcctcctctttgaggctacccaatcagagcaaaaacagtattttaaaaaacctcaactggatgagcctgatgcagtggtgtgctcatgcagtcccagccaaagggtcacttgagcagaggagttcaaggccaacttgggcaacatagtgagaccccgtctctaagacaaataataaacatcaaaattaaaattaaaaaaaacccaacccagtgttcccttcagaatcctgagtggtttgtttcatcttcctctattctggcttgtgtcatcttcctctcttgtaatggataaaaactccaaatgaagacaaaaatgaggaatttgtcaaaaaaattgaattgccaacaaaagccatctttggttgatcaaacggtacagacgtttcagttagacaagagggctaagtttctgagacccattgtacaggattattaatattattcatttttagccctcataataaggtattataaatgtcaagattgctaaaagaatacgtttttaaatgtcttcattataaaaaataagtatgtgaggtgatggacatattaatcagcttaatataatcattttatagtatatgtagctatatcaaaacatcacattataacccataactacatgcaattattatttgtcaattaaaaatacaaatctaggccaaggtgggaggatcccttgagcccaggagtttgacagcagcttgggcaacatagggagactccatctctacaaaaaaaaaaaaaagaaaaaaaaaagaaaaaaaaaggaaggaaaaaaaagaaaaaattgactgggtgtggtggctcttgcctgtagtctcagctgctcgggagctgaggtgggaggatcccatgggcccaggagtttgtggctgtagtgagctatgatcatgccactgcgctctagcctgagcaagagagtgataccctgtctcaaaagtaaaaacttacaacaatataaaaaataaaaatttaaattataaaaagccatcttctttcccactccttcccattttgatacaacagtcccagaccccagacttgctttcctcatgagtcatgcagactcaagtattgcagttccaaaacactgcctgactcaccagctccatccaaaagagtatgtattgtcttcatatgccagataggaaattcctgctgcatataggaaaagcagtgtgtttaaatacatggacacacacacacatacacacacacagagtacacatatacacatctgcatatacacgtacacatatgcgcacatattcatactatatatgtacatacacatgcaatacacatgtatacacaccacacacacacatacacacacatgcatctccaagtctatttccatgctttttttcagtaaagcacctagacaaaggagagagatgtctaatcaggttttggtggttgtcagggatatcataaatgagaatctcaagttactaaacttgatttcacaaaatagtttattggtagttttagaatggcattgcattttaggcagccccaattgtaaataagtgagccgggtaaaagcagattggatgtcacccagaatattttctggaaaggggacatacacaaaattctctctttgcacaattaccctgttttgggtttgcaatattatgttgagcaaggctggctattttccaccaacaggatgttacagcttgtcaaaagttattcaacctatagtgttaagcaggtacttcatcattactgaatttggttgatgctctatggagaaagccaaagttaggagttttgtctgtcattgaggtagagaccctcaactagggaagctttgaactgttcatccagctggtattctgtaccaccttgcctctggagttgagcttagaaccctacttccattttttctgtcacttcagggctgtttcaactattgtttcttcatttacttatatcaagtgtgttttctcaattcataagcatgggagaccccaagagacagatatcgcattagtccttttttgtttgtttagcaggaaggtttttaagtaaagctcctaaatgatatgtctcattctcatggaaattcatcaatattgttttactgtctcctatctggttactttttattttaggtaaccactgtgatacaatatacacaagtccctggatcatgaaaataaattgaagagctaatgttaatagtaagttctcaaccaggggttatgctggaacccaggatacataacccacaggagggccctccgtgaactcagttttcatggaattgtcccataccttcacaggtagaagcatggctatgttaaaagtggccaatgaaagtatagtttctttatgccttatactttgtttggtgaggatttctgccagaggtgtttgtttcctttagttttctggttgctatgattttatacagctttggtgacctctatgagtaccagataaagttaggtatgataaaggcacaaaaagaccgtagaagccatttgtattctaaatataaatatacagactaaatttgtatgcatttgtgtcttcattcttcacggtgctgtatcctccgtgtgtgtgtgtgtgtgtgtgtgtgtgtgtgtgtgtgtatttcttctttgattccaggctgcttatacgaaaatgctgattcatagtgtcactgtcttttctttttcctgcgaaattctaaatccgtttctaaactttttctacaactctgagtttaatctctctaaagtttttttttttccctcttgcggacacaaggcactttgctttgtttatgctaataaatgtcagactagcccccaaaaattagaagaaatgccagtaatttcaaagggctcttgagcatgattttttttcctgtttcttaatacattgtacttttcagagtttaagtttaggtgcatgtaggtggtattagaagattcttagattttattggtagcatccagacaatcttgtcatcacccgatatatatcacctctatgtggtagacccttgtggaaattttctcatcacgaaagtcgaaagtttaattttggagaggaagaggtttttcagatacattaaataggttttgctacaataaggtgagatggtactttcaattgagcatttctcatatactagcaagcagacagcttggcctcctggttgtaattacatgccaatggcttggtgctttttattttagaagttgagttcatcctgaattctctgagcatatggagtagtgcactctgattgttcccattaagattgtaattccatccaaggcttatagtgtcattgtaaacactagatggaattacagccccatgcacattttggaagactgcattattcattgaaatactttataaagttaaataattttgtaaatatgctccaagttcatgggacttagatagaaacataatcctggccacaaaggaggttctcagtaaatatttcttgtttatttgatggactttccttatatctttaaataaactgtatttttaaaaagtgtagagaggttatacttaaatatttgtaggactttaaaagatcttgccttgaaatgctcttacggtttcttgcttttcattgatggaaaaattgacttcccatatgaatatgttatttaatcttttctgtttctagcctagagagaaatactgagtagctcgagtggtcaagaatctttattttagggacatccgcatgtcctaagtaattcccttctatataaatatctcttttcggcataatgtgttgcatgccttcaaggtggaccactatgaggtgaataattacacaacgggaagcctggctgtctcgtggaatattggatggatggctttcttattggtcttaattaggacagtgttgttaagataattcactaattcacagtgcgttatcagatttgaaatgacctcttttttttatactacttcggaagtgtatgtataccttttaggaaagacctggaaggataagttgtatattttagtatctgatatggttttaaaatttaagactctgtgttatgtatgttttgggatgactataaataatctgtgtaacaaggtattaccaaaaaccttattgcctttgccaccatgcactgcaaaatatagtatcaggaagcgaaaagacaatgcattttgagtaatttttagaatttgcatttttgtgaattgacatgtatgtatggaggacttttcaaaaaaaacagaacttttcattaagaatattcggtattaagatattgttttaaatgtcagatatttttaaaatatatgaaaccatattaatcacgtattacttatactttttgtccctggaaatattccatttttaagaacagagataacaaataaatataccagtaaagctaaagtcagtgctttctgctcttaaaataatttattgaacgataaaatgaatgtctttgctttgtgaaattatatttttgtttaggacttgataatgcttagagaacattttagtttttacagtttaaagaatgaataatgactggttcctctgctccctgatttgtttccatgtagatagtacttcatttttattacctgtaaacatgtgttagctttatcaattaggctcaattgaatgaagcataaccccctgaaaggccttgccagtaaaataataatagtaataataatattcttttcttcagattctagcagggagtactgctggcttttatgtaagaagtcaactttaaaagtgtttttgtgtgcgtgtggtgtgggtgcagcagcaatattgtgtattcctttcaaatcaagatgcctcatagtctgtgggcgggggaactccctaagatgccctcactagttactcattcatttgttcctccccagaaagggaaaacccaatgctccacactccacttattctgaataatgggggcggggaggtggtggcgtgaggatgtcagtgtcattgggcaaaagccttcatttttaaagtttagcaaaatgcagttttattgctttatgatcagtgtgtattacaagctaatatacaaatggcattagtgatcaaagtgggatactgatgtggcaaaaatttacaatacacttaacagattgacctgacataacagtgaaagcatttgaattccttcccacatagtaagtaacaagtaatttctggagccagaagtgggagggtgtgtgtgtatgtgtgtgtgcatgtacgtatgtgtgtgtgtgtgtgttgtctgtagaagttaacaaatatgttagttcattgaccatttctttcgttgtcctaaagaaaatttcactcacttgtgcttctgatttgtttcccgtgaagtctcttatcactcttagaacatgaaggcgaattaatgaagaatccttaattcttcaaaaaaaaaaaaccagccctaatttaagaaaggagacatttaacttgctaataagatcctaaaattttataggttatataatacattcaaggaaattgaattatatattcattaagaatacattatctctattagcagagagtaaatgattgaggttttactgaacgctaaatgctcagaaagtaaatgcaaagaccatcactggttgagcacgctgggaactgggtggaagtcttaggcctgtcattaactgttgtgcggcctttggcaaataaccgaagttctctgagccttaggaaaatgaggaagttgggttatataagtggttttcaaatgtggcttcagaaaaccctggagagccactgcactccagcctgggcgacagagtgagacaggcctctgtggaattagccaagggtttgggtaaggggtggggctgagacctgagaatctttatgttacaacagctattaggcaatgtcagttcacaggaccactaaatcaaacaatccttcagaccacttccgactctcaagtttcaataagtccctagaaaacatcatccttggtccacaggaagcaatccaataaggaacttggtctcccataaagaatccaataaagaaaactttaaaatgagaggagggttatggatttgatcatctccaaggacccctgtcaagcaagtctaagatctttccaaaggagatctgagaaatatgtctgtatcccaagaaggtttgacaatagtccctgaagtttgggggatgacttctagatatccctgtgccttcaagcgtgatcatgggctggatttgttggccccatggtctgcctctgagtcacagacaaatgatgaaaaaaagaacaattttctgtcagcatgccagaccaagggaggggccaggagaagaaccgtgaaccatgaactgtgccactgctggaggcactgacagctccttggcaccagatgtgtgacctcaacccctgcagcttgggcacagataatatctcagggcaggggatgaggaatagaggaagaagggaaagttgcagggatcctggagtgttaatacccatggtggcggcagagcaatttgccaggaagaaaactctctggttaaccctccggcactagttgccaagcatgtttgtactagaatggagttcaaagttacaaacagagcactgtctgtttttaaggactcatatgaaaggtttgcttgtcctaagcctgaatccaagagtctgtctgtcataaacactttcaggtagcccaaaaatcccttcaatgtgatctccagaataggggaagacaaaggactcaggtcttcagctgtctgatgaggagtgagaaatttttctaatgaacatctctggcttatggatattaaggagagttcagtgtcaaaagtttctgcagcgtagttaacagaggtggaaagttgaaataaccttaaaggcactgaagctgagaaactgccctctttatcctaacagccacagttagttttggaacactgtccatggagaagctcagggctgtcaatttagaaagcagctgtgtgctggcccattgggcaccatctttctctcataggttgttctagtccaaggtgaagaaagctacattttgctctaagctagactgacatatggacttctagatttgaaccctaaacacaggaggaagtgattgattgtattacaaaaagaatcttctttggtaaataactatttttttttttaatggccagatgggagaaagcaaaagatgccttttcgtggtgttttggaaacctagatctcatcaactccctggttggttttggcggtcaaggctttttatgccagagcaactgtgagccaggtttctgaggttcttcctgacccatgttggtagcctcttaaaaataactgtcattccaagttcagctaaaatatataactcaacaaataaatacatataaagcatatgaatagaagcgggaaagtgaggattaacagactggagagtaagagtcttgccatgtaaaatactataaaacactcttaggaagtctcttgcttatgttattacttgtacagtaaatgtggagacctggatctcttcctcatggtcccttatttcttgttttcctgctgggaggtttcaagtagctgatcccttgcacatgtactttaaaacttcaattatatttgtcactggcttatcatgggcaatgtatgtgaatgtgactaagggtcctgataaattaaatgccacttttacatgttcctttctttttcttctattagtgttctttaggactttgaatgggaaatcctcaaacatgtaagtctatgtggcttcagaaaaccccagagaggccaggcgcggtggctcacacctgtaatcccagcactttgggaggccgaggcggacagatcacctgaggtcaggagttcgagacaagcctggccatcatggtgaaactgcatctttactaaaaatacaaaaattagctgggtgtggtggtgcacacctgtaatcccagctacttgggaggctgaggcacgagaatcacttgaacctgggaggtggaggttgcagtgagctgagattgcatcactgcactccagcctgggtgacagagtgagactccatctcaaaaaaaaaaagttctccccagtggcctctactgaattatccaagtgcttgggtagggggtgatgctgaggcctgggaatctttaataagaaagaagaagggaaattccttatgttggacccaacattgagtgtgttcagatacagatgttggcaggtatgggggcattcggaaggagaacagcggctaaccaagctaactgagactgagttcaagattcgcttctggttcagggggactttcgttttcaggctctaatacattcagaagagcaaatattggtactttaatcatgcatcttttccccctcaagttctgtatctgccacgtgtatattttatttggcatttaaatgcacagttcttataattgctgataaatagtctccattgcacattttgctggcactgtggcctcactgtaaatgctctctgtatgttcttgggaagttgcataatggcagttactctagtttactgtgcaatatgctcagtgactaatggcctaatcatgacttgaaaaatatataaacagttcaacagaagcagttgattcactgagctctttcatccagacaagggtgagctaatgggaataaaaaagacggaggtgtgcagcagcgtctttgatgtattgaagttagagcattcccacaaatcccatgcattattgctcattgatggcggatcctttttcatatgcatgaggcaggagtgccaaattatcgtcctaattggctctgacttggtattccttaatgttcgtgttacacttgttacaacttttttcctttcctctaaatactactgacagtaacagctttggagaggcaggctgtcacgtggccccatggcgtcaccctacactgcaggcttaagtgtggctctggtcctgtgctctggtttcttgggatagaattacagctgagactgtgcagtgcggacctgcctggtttacttcaggggcattgttgattgacacagattcttgttcccttgtcctcagtggcaccttttcttccaagaggaacagagatagagtcttacaacagccattaaatagaagatcctggggtctactggagcactgtcccattggtggggagaaataacaatcatcatcatcatgtctcccttcctttggaattgattaggtagctcctatattccacattcctctcacctgttgaccacacacaatttttggtcttgtagcttggccactcattttagctcaatcactggtttaatttttttaatgaaatcactcaatcgatagaggctaacctctcgtagatgtaataattccaaccattctcaaagaaataatgaagggtggaatattatgctttctaaaataatggaatttattttttctttatgcccacagctgtttagtcctaaagagggggaagaaagaatctttcgatcttttggcatgttccatgtcccgtattgatggtcatacttcagcttttttctggttgtttaagaattatgtggccaataggctgccttgtatataacagtgaaaaacacccattacttgtatttgtttcattttaaggtttaggcagttggagcataggacagtaactggtttcccttgttttctggaacctgccccttgctctctcttgggtgatgcctcacccctgccccagtgtcagagctgccctgggtccttcttcccttgaagggtctgatgaatgaaccacacagcttgttagtatctcagtttgttaatcctcccggaggaatgtatgtttcaaaaaagaagctgaaaagtataatggatgagaatttgctttggaactcagcacactgtagattagagaaggaaaagaaagaaaaggaaggaacagaaggacatgtttggggggtagggggcctttctggggcttctgaaagcaaatgttgtgataattagttacagtgtcccaaagatgcctgggtctacccctgaccctctacacaggccaattctgctcccaccagaaaaaaacaagagtacagagcaaagaggcagggcagcagcctctgatacctatttgaactttacacattctgatagaatttattatctgtattgaatatgggagactgtgggtaaaagacttcaagacagtgaaaaactaggaaagaaaaataaaggtgtattgggccttggcaaatttttgacacttacttgactatgtgctttaactttttgaaaaggcagataatatagcaatcacattaaatatttatctttaaaagaaattattttaaaaattactcttaatattaccacattatgaactcaataggagatcctacagttcctttaactttaacaacagtacatttgttaatattcattaaagttaaagaagcttactattacaacagaatgaagtaatacttgctggaaaacaccaatattttacttatctttatctaatccccccgtttaactgtagtgatacaatacttaattttaaaagaggaatggtttgaatgtacagacttttacatgtgttcttccattgagttctttcttgtagtctaacccaatagttatcacacttcagtgtacatgaaaagtgcagtaaaggattgtgcagtatacataaaatcctgtgtggagtgtcttgtgggaaagccaaaggattttcaaagttaattttgactatatatgacttttgcttaacttttgaacttaaccgcccacataaaaactcactccactatatttcccttctctttgcctccctacttctgtcccccctttctcccttttttccttcctcccttgtattcttccatccatccatccatccatccatccatccatccatccacccacccacctatccatctatctatcctcccatccacctatccacccacccatatatccatccatccatccatccatccatccatccatccatccacccactaactcatccatccatccatccacccacccatccatccatctattcatccttccacccatccgtccacccacccacccatccattcatctatccttccatccatctattcatccatccacccatccattcatccatctatctatttgtccatccatccaccctcccacctatccatccatctattcatccatccatccatcttttcttccatcactcctttctttttttttttttgagatggagtttcactcttgttgcccaggctggggtgcagtggcgtgatctcggcttaccgcaacctctgtctctcgagttcaagcgattctactgcctcagcctcccaagtagctgggattataggcatgctccaccacagccagctaattttgtatgtttttgtagagatggggtttcaccatgttggtcaggctggtctcgaactcctgacctcaggtgatccacccgcctcggcctcccaaagtgctgggattacaggcgtgagccaccgcacccagccccttcactcctttctttttctctttccctgccttccttttgataaattaacttaaacattttttttggtgaaattaatatggtgatgtctacttatatttaaatcagaaaattattagtatgctgaatattccaatctcttaggaatgataaaaatattctataaaggtcaatcttaattccacatcctatgttcctactcagctttctgtctctgatttctcatttttagctgggaacatcccagccaaaagacagccaggttctctgtgagcatagcatatcaaactaactgtaagaaaataacattttggcttaaaagccatcttctaatataagatagaataaaaatgataatgattggtatactatgtggcattgttagtaagaatttgaagtaagatttacctaaatcgctgaaaatattgaatagttggctgagactttagaattggtacaaacatgtacattttctcaaaatcaaaagaattaaaatagatatccaagaagtcagattatgaaaaaataagatagtcaacggaaatcctaaaagtaacttaaacattggcattggacatatttcatttgtatttctgccatagaagagttaagttaatgtgcatttttgccatgcaatggcaaaatgaagagacttttttttcccttctttttgctcttggtaaaattaagtggcaaagaaaagatagctctgaggttattgctagaattttgtgctaaaaacattttggctagagcagcaagtttttaggcaaacagcccctgataaaagttgcaagaaaaaaatctcattcgagtgcaccaaacacttttcagatgaccatttaatttttttaagttgcataaacaatttcaagtgcactgtaaatatagaaaatagggtatgatagttgacagaaacagaatgaattaagagcagtaatagaaaattgtaaacaattatatctgaatttcatcagttgtcttgcttacattcacaattagtcatcccgtgaaagacataggtgaacatttagctgcttaaaaaggaattagctgcttgaaaggacaaatgttcatgttaaatttcatgaagactaaccttcagcagacaacggcacaaatgtgtcagctttttctggtgtgaatgaagcaagatacaggcaaaacagatgagataaataggacttggaaaaaaaattctactatacaagttttgtatccccatctttttgctctttgtggagcacctactggaaaccactcctgacctaatgatgaggacacagagagaaaattcaataagcaatggcctgaaaaataatttttatctaagtattagataaacgcagtagcatatttgacttgtaaaaataacatggctaggctttgtatgcctccctgtcctcttacctacgtgggattttcaaatagcactgattctggggaggggaatcaaaaaatagaagactcccctctcccagagcacacgtaattaatgcctgtgttgcagctgggagctctctgccagcagagttctttgctcgtcatctctcagcgctcacccacattccccttgattcacaccgtattgtttgtttacatgtttgtctccctgactcaggttggaaatctttaaggacaaggacaacctcttgttcctttttacatttcccatggtgctttgctcgcagtggccactacagacatgattcattcattgttttaaaaaaagtgttaactagttaagtgaaaataaaatgaaacagcaaaatgagacaaacgcctagatctgaaaggctacaaaatacagcagagggttcagtggacataagaggaaaggaacacaatgatatccccaatcttgtgatggaatagaaaaaaaaaaagtgattggtgttgatgtaacacttttcttggccagttgaacattccagagtagaggtcagttttgtagttaaatctggtaggaagatgtttccaaccagaaggaatcatactaaaattattttatcacaacaagcagtccataaccgaaactttaatttgtgagttgggaatcaggataggaaacccaattttatattctttttataggaagaagaatccattccaccactcagactgctttcctctttcataatcgtggcatactctgccattgtttgtttattttccccacaactagatggagagtgcaaggaccatattttactcatgtgtatcctcagggcctagcacaaagtaggcactcagtaatgaagaagtaagatgtttcaatgtccctaacatttaaaaggatgtatgaaactagtgctaataccagaaagagttggttttcataggctgttaattgtgggttttgaaataatgtactactttgtacattgattttatacaactgtgttatatacttcagtaactttcaaggtaaaaagttagaggttattaaatctggcagggtcttaaaacctgagtctcagtccatgtaagagcattcttttgctcttcttgactagccatgtaaaagggtgaatgtaagttagtgaattatcttttagaaatcttcagttgtatatatatttttttcatcgaattgcaaactcactcacacttaccaatgtaatactaccctgttgatgagcattagtagccttatttgggtagccagattagagacacaggcttcatggtgttacctgccttgatgttttcattcataatgcagcatttgggaatgcagcatttttctatattggagacatgtatgatgatgtgtatgttccttccccataaccctgtccgcttctcctttggcagtgtcttgcatcacaattttattttatttttatttatttatttattttttgagaaagagtctcactccgtcacccaggctggagtgcagtggtgcaatcttggctcactgcagcctccacctcccaggttcaagtgattctcctgcctcagcctcccgagtcgctgggactacaggtatgcaccacaatgcctggctaattttttttatatattttttttagtagagatggggcttcaccatgtcagtcagactggtcttgaactcctgacctcaaatgatccgccagcctcagcctcccaaagtgctgggattacaggcgtgagccaccgcacctggcctccaattttaaatatatgtaggctccatctccacctctccctgaaaaaactttccctgctcctttcgccttcatgtgtgccataagttgactgccatcaggccaatatcattacatataaattccctccacccttcgttttaattttaaaatatctgaaagggggaaagggagaagattccctaatgagtatgttgtgtgattcaggaccttggctcttagatcctcagtcatgtgatattttcagattttatgggactatggtgcaattgaagaaaggcttttgacagaaaatgtgaaatgatgaagtcttagcacggactcatacggcagtatttgattgcgggttaatctccaaacgttgaaataaagtggatctgttaaaaagccattggttactttcagttgccaggggtgtgtatgctcacattcctggaagcacattctataaagtcaccaatctacaacacagacacccacctccccctagacttcagagagctctgctgggctgcagctttctaccaaaagagttgtgtgcctctgaatttcacatccaaccttggaagctgcagtctgtttaagatttcagaaagaatgggggctatgtttccagtttactgctttgttattttgaaattgaaagtctgagcagaattcagaactacacaaaacaggatcttttcacatgtttgtttaagtcatgttcttggcaaaaacttgctgaggaaatgatctgtttctctaggagcattgatttcttactccagtacagtggccatttcccaggatctcattccaaaccatctgttttgccatcagagccagcctttcagtgaatgatctctttggtctacactgtgctaaaccttctgattgaaaggatttttattaatgaaatctaggtaataaagttgcagtgaactttaggaagttctctgtaggcagggcgtggtggctcaagcctataatcccagcattttcggaggccaaggtgggcagatcatgaggtgaggagtttgagaccagcctagctaatacagtgaaaccccgtctctactaaaaatacaaaaaaaaaaaaaattagctgggcgtggtggtgggcgcctgtaatcccagctacttgggaggctgaggcaggagaatcgcttgaacccatgaggcggagcttgcagtgttgcagtgagccgagatcacaccactgcactccagcctggcaacagagcgagactccgtctcaaaaaaaaaaaaaaaaaaaaaaaagaaagttctctgtaacagtcaaatagcaagtgctgacctctgtcgcctctgtagcagcagtatggatgaattgtgagcttgttggctaggttgggctgcgggtcattgtggaaaagccatgtttcccttgcctgtggctgggaataagtatagtggggccattttaaaaaaaagtcctgtggttgaattctgagtttgagctgttttaaaatgtcaaacagactgaatccttgggagactcatttgaatgagaccagcagcaatgtaagaatatatatatatataaaacacgttagagcatttccatgtatgggagggaactgatggagagaacacagaccaccacattaactgccacatgctgtcaaccagtggatctcaactggggaccattttgccctctcaggacatttggcaatgtttggagacactttttgatcgtcccaaatgggaaaacaaggtagcaatactggcatctagtgagtagaggccagaaatgctgctgaacatcctgcaatggggctgggggcattggctcacacctgtaatcccagcactttaggaggtcgaggcaggaggatcgcctgagctcaggagtttgaggctgcagtgagctgtgatggcgtcactacactccagcctgggcagcagagtcaggggtctcttgaatgaatgaatgaatgaatgatttttaaaaatcaatcaatcaatcaatatcatatcctacaatgcaccaaacagtcctctgcctcaaccaaggatcatctggcccaaaatgttaatagtgctggagttgagaaaccctgccttagaccctttccttctcatagtttccaagctgataaatcagcctgccttgacaaaggtgaggaggtaagctgcaggcgtgagtgggaagagcaggataaggaaggaaacggagaaaagaggtagcagcattgcatgaaaataaactacccgggccatatcccatttgtgccaaattaatatttgggattctgtctttatgtgtttggtaaagccggaaagtatgtgggtggctggctgggccatggcctttgtgttagaggtgacctgagtttcttcaaagcacctgtgttagtttttcattgctgctgtaacaacttatcaggaactttgtggcttaaagcaactgtttttatctgacagttctgcaggtcagaaatccaatacaggtctcaccaggctgaaatcaaagtgtcagccaggctcattctctgtagggactctagagaataattcatatccttgccttttccgttttctttcttttcttttcttttttttttttttttggcgggggggaacggagtctcattctgtcgcccaggctggagtgcagtggcacatattggctcagtgccacctccgtctccaaggttcaagcaattctcctgcctcagcctcccaagtagctgggagtagcccagcaccatacccaactaaattttatatttttactagagtggggtttctccatgttggccaggctggtctcgaactctcgacctcaggcgatccacccgcctcggcctcccagagtgctgggatcacaggcatgaaccatcgtgcctggcccacctttttccattgtctagatgccattgtatttcttggctcctggccccttcccctatcttcaaagccatcaatgttgcatctctctgtgctgtgtttccatagttgaatcttcctctgacacttcttcctccttctcagacttttaaacttccttgcgattacattggacccacctgtatcatctccccatctccagatccttaatgtcatcacatctgtgaaatcgcttttaccacgaattcacagactgattctggggattaggacgtgggtatgtttgaaggtcccttgttgtgcctaccacagactccaaggcatttactagagccacattttgctgacttgagctagatgtagcaaaagaagtgttataaaaatgggtttttaaaaaagcctttttttttcctgtggtataattttagtgtttagaagtaatttttcttttaatgcagtatgacacagaaaacatttggaggatgttgaaaagtaattgtttaaattggcaaagacacatttcagtaagggagtaaacaagagggaaacgtgttggggggaaaggtgtggggaggaaactctagaccagaggccctaggacttgaatatacaacttagtcctgttgaaaattcagattcctgggccttaaagtatgttaaataggtcaggggtggggcccaggagttgtacttttaacgagcaccctcctgtgattcatttaacataaaaggtccttggctcacacttggagaaacactgctgtagaaactcaaatacctattttaaaacaaaggtacattttaatcatttagtttaaaatgaaatcattgcataatactgatgttagaggttagaataaacatgtacttaagttcttgatattcttgtcatttcagttacatgtcagggaatgtgatttgtgttttgacgtattcaaatccttgtcatattcaaccatattcgtattcaaaatatataatgattttgacccttgattgttcgaattaagactgtcatcttttctgtgtgattaactcttgtgttgatataaatatgcctttggcttactaatgttcagtaagaactaatgactcttgggaatgttaatagactctgtgagtccctttttaatcatttgtaaccaggctgtcattccatgtttgtttggaagcttagagataacatttatgaactttgtgacacatagtagttgctcaataaatgttaactgtagaaacacattgattagtttcacttcagaaatagacacttagagttcaaaattcccatctgcctagctcctgaggcccactttcttaccagaatctttcctgataccctctcctgcataaaatggttcctcttttgagactttgtagctcttttgtacttctcttattctgttacgttactgcaaaaaaaaaaaaaaagaaagaaaagaaaagtgccaattgtgtacatgctttcctccctgctggaatgtaaactttgtaaaggcatgatccatagcagatacttcttattacaaactacctggcagaatttctttctaaagaacctactcagtaagcctgttggtgaactgagcaacatttggacaattatggcatcatcttacaatttttcagctattggttttcacttgtttagaaatgtaaaactttgcaaggacttttataaaagcaaatttcagaatagttattcactaagcttttttatgctaatgatgtcatgctatcaaaaattagctagagtaaatggactgtaatgaggatggtttgtaatctagattatatgttccacatgtaacatcgaaatgaaatataaaattgagttgttggcatgtggttgtggtgagcagaagcagttattatacattacttggtaaaattcatattcatatcttgtcagtttacagtgagccagagattaaaaataacatttgtttctgttttagtaactgcttaaaaatatccaaaatcattttattttctttagcctgacttctagtagtgttttgaatatgtggcctttcaagcagtaatgaaatgcatcaatgcgacttggcagtgcctcacaggacatgcttctaggatcatttttaatgattaaaagtcaaattgagttctaaaaaactgacccaaaatatagatgagccaagtaaaaacggaaggaaatctgaataaaatcttggttcttggtcctctgcatgtatcctccacatctgttttctccagatctcttttttcttgcttgttgatagcacagaggaagatcgcagagagtaatgtactgtatatgtttcacatcccccttcctctttagtgatagtttggagagtatactgcagtcaccatggttttcagtttggagagtacaaggatcagatctgtattttctagagccagcttttgtggcattctggagaggtgattggagaaccatgagagcaggcagacatctgggtgagagggcacgaggggtgagtgacggcagagccagacttgctggagaggcagaaagggaaggattcaagtagcataaccaggaaatagaattgataggatttggtccctgctgacctgtggaataagggggaaggcagaggagttgattctagtatttctaagttgggccacttagtgatattggggtaccaggaacaggcttagtggacccacagaagtgaccagacccaggagtctctctgagcgcccaccctggcttctctgtgttggcttaccctttcttggttgggggtcatggggtggtcagcttcagtggtgtggtctgaggtgacaggtgctcaggagtgaggacagggagtagacatcaccaatgtgaatgtggaggtaggcaacaagagttattctagaactgacaaatttaatatattttgctgactgctgagttccatttggacaaatacctaatgcatttggggcttaaaacctagatgacgggttgaagggtacaacaaaccaccgtgatacatgtatacttatgtaacaaacctgcacgttctgcacatttgtcccagaacttaaagtaaaaaaaaaaaaaaaaaaaaaagattgttcagttcagttcagagagcaataggagcagtttgctattcaccaaatagggacatcaattctttactgattaatagcagtgattcagaaaactgccttttgtagtagagcacaccaagggggtctgccggatggaaaaagagaacagtgctttgtgaactataattgttgccataagtaaatacttaaaatacactaaaatggcaacatcaggaaacatgactaaggagtcagtgtacgccacgccctttcccccacctttgtggttgttgaaaatttccaccaagagtgatgtatacaaaaaagggtaagatcagggtgttaggtttcagaggaaggcaaaaacttgtgtgattctataaatggagcttacaaatggaaatgcaccattcaaggcagaaagtctatcacagtcattaggaataagcattagagtgattctcctttcttaacttctgcacagaagtttgatgtggtaaagaaacagtctgctcttagccatgttccttgaaaatacatgtcttcaattacttggtttgtctgagagaaaggagggtttggaggagaaggaaatgcctcgtgagtttgacatactatgggaggattgttgttattattgcttgatttacatgctctcattttatacaaagtgtacagcacaatttctcaaagagtaattatgatgccaagaaaatggggtggattctgggcttcctgcagtctgtcatccaaataataatattcattacaaagatccttacccaggaggccaaggtgggaggattgcttgaggccaggagttcaagaccagactgggcaacatagacccctatctcaaaataaaataaagtaaataaaataaaataaaataaaaaataaaataaaataataaaagctccataccagtttgtggcattcctactgaaaacagaggtatacgaaatgcttgaacagggcatggaactggaggtatggatgtcattaagaatggctgagaattttttgccaagagttagtatactatcctactttattctatttcagtttgcagtaggacagacctaattctcttccctgagaaagtcacaaataaactagcatggagcttctcagtgggcacccttggctgaactctatagactcctgttctctttaataatatctaaagcttctggttcaattacatggctaatatcttgactctcaagaccaaaaggcaagatgtttaaaaataaaatcaacgttaaaaacatgcctgtgttccatggacacaggaaggggaacatcacacactggggcctgttgtggggttgggggaggggggagggatagcattaggagatatacctaatgctaaatgacgagttaatggttgcagcacaccaacatggcacatgtgtacatatgtaacaaacctgcacattgtgcacatgtaccctaaaactttagtaataaaaacaaaaaaataagaaaacaaaaacaaaaaaaacatgccagtgttctttagtcctcactcaattagagaaaaatgagagcaagcatgatattttgtatctggcactatgtgcactgccttgagagatttctctagaaggttttaagaacatctgtcatctattaatagttacgaaagccgagactcacacaaatgaggcaacattacagggggtcagagagcacataggtaagcccaccttgatgggagtcctggcccgaggcactttggggaaagagtgagctgcagtggttatagaaagacaaatgtcttgagccgggcattgaaaaatgactaagaataatctagaaagtgttcagtatgtttttaacgattgtgggttagcagaaggaaagccatctgaggtgagagaaataataagcaaaggggacagaggtggatggtgaatcaactgacccaagggagttaagcgtttagaaagcacttcaaaaggataacactacatagctccttgccttactgtggtgccttagagatgactggcatttttgcagagcttgtttcataaatgtgctttcagaggaataaacaggggattcgggctgggctgaggataccttgaattttgtttacagaccatcattttgtttacagaacatcagtgctctatcctcatgtccttctaagaatcaaaagttttaacctcacagaatccagcgtgtggcttgtgagtgagactcctttttccatgtgataaccggtctgctttggggaggcaaaagaatcttaccgacacgtacatattttaggatgggctctgagccaattcatcaagccaactcctcactttgaaacaagaaagtgaagaggatgtttcatgattgtggaatacctgccagaggaagaatctaccgaagttcagtcaactattaattggaaaggaggcagcagactgaggagatagagaatctttgctctcaggtggatggaggttggagtcctcaatctgtcacttgtgggtacattatgtagctccttcacctccatttctttatttattagaaggcgggtaataaaagtgtccactgcctaggatggttctagggcttagaggagataatgaaactcaagggcttaacatgtgaatgttagctattatcattgcatgtgtccattaacacccaaagataaccagtgttgtttagtagttctttgcgtattttctttctaaatagataatgatttataatttacctagttacttcatgaattgatttcatgaaaaaggtctttctgaatctctttccatgtactttaaaagtttattcctttagttaaaagaaattttaactagattcttaaagcctagattggaagaaagtgtttgctaaaaaaaaagtcatggctgggtgcagtggctcacacctgtaatgccagcactttgggagaccgaggcgaacggatcacaaagtcaggagagcaagaccatcctggccaacatggtgaaactccgtctctactataaatgcaaaaagtaactgagtgtggtggcatgtgccagtaatcccagctactcgggaggctgaggcaggagaatcactggaaccagggagtcagaggttgcagtgagctgagatcacagtactacactccagcctggtgacacagctagactccaaaaaaaaagaaagaaagaaaagaaaagtcatgtatatatccagaagaaaggaaatcagtatattgaagagatacctgcactcccatgtttgttgcagctattcattatagccaagatatggaatcaatctaagtctccatcaatgaaggaatggataaagaaaataaggtacatatacacagtggaatattattcagccatacaaaagaatgaaattctgtcatttgtaacaacatggctggaactggaagacgttatgttaagtaaaataagccaggcacagaaagacaaatatcacatattctcactcatatgagggagctaagaaacatgacgtcatggagacagagagtagaatgatggttagcagaggatggaaagggtagtgaggagggaggaataaagagaggttggttagtggctataaaaatatagttagatagtaggaataagagctagtgttcagtagcacaatagggcaacaatagttaacaataacttattgtatatttcaaaataactagaggaatgaatttggaatgtccctaacaaaaagaaatgaagtgatgggtatcccaaataccttgatttgaccattacacattgtgtgcttgtatcaaaaaatcacatgtacccaataaatatgcacaacgatcatgtacccataaaaataaaacaaaattaaaaatgcacacttctcacagtttcttgcctagtagaatccaagtaaatacagttttccgcccacagataactcttccctctggtgccctcatggtttatctcatgttcttgaccacatgggttaatggtctttgttaggttgtactcagtgatccccaagaggacaaatggtgggaattatggaaattgaggccagaaggaaacctagagttctgtgcttttacttccagtagggatctgtggggtttagaatgtctgcctggtcagcagttctcactttgggaacccccccacccccacccaagaccttttctggagggacatctgtaagatcaagattatttttatggtaatactaagacattatttacctattccattcccattctcttccatgtgtacagcggagtttttcagaggctatatgatgtgtgatgatattgtgtaatgaaatgtgtcaacttttggaagatttgcataattcactgaactaatataattttccaaatgaccagggtatgatgttacaaaatcatgcatagctaaagatccatccaaagttcaagatagactaatgaattttaatataaaagaatacttagagtttatttctatgcttcagattccatggtgctgctcccctttaagaaactaccacttattgagttttggtatgatataaaaaaagaatatccacaattgctgaaactattggccacatcttctccacatacttcaaccaaacaacatatcacagaaaactgaattcagaggcacagaagagaatttaaccattttccattaagccaggcattaaagagagctgcaaaaatctaaatggatctcactcttgtcactaacttttttgttctgaaaaatataattattttttcataaagatgttatttcatgtagtatgcaatgggtatattagtatttctattaaatgaactaatgaatattttacatttttctcaattttgcttctaatatggtataatagttgttaaatatgatctacctaatgaaaagttccttggggtcctcaataaattttaggagtatagaggaaactttatactcttaaaatttattgaggacccaaggagcttttaagtgtgaggaccaaaagtgtgaggaccactggcctagtctggtcagtgtctacaccctgtgtccactggtttcacctttcttctggaaaaagtgttctgtggtaaaatatattttgggcctagatgagtgctttctcccctcatagatttacaatacacatgaacatatgagaccctccaaagtctttcccaaatttatcccaacctttaaaaacaaattatcccaacctttttttatcctccttttaattttggcacaacataatgttccacaatggaatataacatcctatggaacgtaccggctggtatatgatatgggctgccctctttccgttaacaaaaaaattaaaagcaagacattttccttcaaatccatactttatttagagagaggcctataaaattcacttgcgaatctgattgactttcttaaaaaaacatactcttcattcattgtattatgccattttgcttatactctttgaagctgtttctacttctgtttccaaatgcatatgtttttttaaagctctgttttagacatttttgtgtgttaattagtagcatctgctccatgtgtcataagacaaagtaatttcatccccacaaaattgtccaaattgcaggttaagtggtagcagcctagctgttgagctgttactactgtttggtatttttaaatggcaaaaaataccttcggtgatgcatcacatgcctttaataaaacacagtcactttgggtaacagaaagatttagaaatggcagtgggttttgttgtatttctttttatgattctttctttccagtgctttagtttccattggttgtgggtacaatcctaagagtcagaccaaaataaagaatattccatcagtatggatcaaaaacatgttcctggccggacatgatgggtcacacctgtaatcccagctacttgggaggctgagctgggaggactgcttgagttgaggagttcgaggttgccgtgagctatgatcacaccactacactccagcctaagtgacagagcaagaccctgtctctaaataaataaataaataaataaataaataaataaaaaattaaaaaacatgctcctggctgctgcgtgatgagcatcatcttcctaagacatgagactgatacttgcaccacccagcaccagtttcttcccggcacagtgccattctaaatttgtattgaggcaggagtgcagcgagaatttctttctccttctgtatttcacatgtctatgccacagaaagaatagaaacatcttaatttgttataataattatagggacaatagtcactgtattttatataattcaaaagttctttttaaaaaattttttggtcttgccggttcctactgaaacacttcgtacagtttgaatccttagtgactttctattgccaactgaaaattgattttttcctatattaaaaaaaaatccagccgggcacggtggctcctgcctgtaatcctagcacttcgggaggccgaggtgggtggatcacctgaggtcaggagttagagaccagcctgaccaacatggtgaaaccccgtctctactaaagattaattagccaggcatggtggtggacgcctgtaatcccagctgcttgggaggctgaggcaggagaatcgcttgaacccgggaggcagaggttgcagcgagccgacattgcaccattgcactacagcctgggcaacaagagcaaaactccatttcaaaaaaaaaaaaaaaaaaaatccaaacagaaaatactgtggctatcttattcagtatcttgttcttttccttaccactgagtagtttcagggaaaaccctttacaattgcaaaaagacattcagtttataggactatttattacagcgttggcaaatggtgctggaaattctctaatagttaaatgacgcaaattaaccagactgaaatggaagaaccatactgaggttgctcttcaaacagcaagaggctacctttctgttttctttgacaactgaatatagcttatgatatagttaaggtatcaaagatgcaagaattgtagagctatgtggcaggttaagaagcctgatgaatggccgggtgcagtggcccacgcctgtaatcccagcactttgggaggccgagaccagcagatcacctgaggtcaagagttcaagaccagcctggccaacatggtgaaatcctgtctctactaaaaatacaaaaaattagctgggcgtggtggcgtgtgcctgtaatcccagctacttgggaggctgaggcaggagaattgcttgaacctgagaggcagaggttgcagtgagctgagaccacaccattgtactccagcctgggcaacaagagcaaaactctatttcaaaaaaaaaaaaaagaagtttgatgaagatgcagatgcttcattgcttgtgcaaattgtgtgattttagcatattctacagtggaaagtcaaatttcaggcatgcacacctaaagtaggaaaaatggttcttaaaggggtagtgtgatgcagggattaagaacctggtttctggagtcagatggcctgagtttgagtcccacctctaccatgtatgtgtgctgttgaacaggtgatttaacttctttggggctcagtttctcccactgtaaaaagtcatgtaaagttcccagaagagtgtttcatacattgtaactgtagtagttatctactgctgtgtaagtaattactccaaatcttagtggcttaaaacaacaagtgtttattatctctcagtttttctaagtgtgaatcactgcatatcatagctgggtgtctctagctccaagtctttcatgaggttgtagtcaagttgttaacctgggctgacgtttcatctgaaggatagggtgggggcggtagggatctgcttccaaatccactcacatagatgctagcaggcctcagtgatatgccatgtgggcccttccacaggactgcatcacagcctggcagtcagcctcccccaggtgagtaacccagaagaggatgcaagatcccaagatggaagccaccatcttcatgtaacccagtcttggaaatgatctcccattacctttgccacagtctgtttgctagaattgagtcactaaatccagtccacactcaagaaggctttacaagggcatgaattccaagaggtgggatcactggaagccatcctgcaggctgcttataacagtaacttgtgctttaatttatatccccttatggtctattcctgacaatcagaccaaatgagcccttaaaatgtaaggcagatcatgatactactgcattaaaaattatctctggtcttcccattttacttaaaagtcggtatctttacaatggcctacaaggcctttcatgcttataaaattatttttctatattttgtaaaataatatatatgtataataaatgctatatatgtatatttgtataaacacatgtttatatgtttagttatatatctagaatttattttccatatggtgtaagatagcaatctctttcgaaacgaagagccaggtttcccagcactatttattgattacaatacccttttcctgggccaggtgcggtggctcacatctgtaatcccagcactttgggaggtcaaagcgggtgaatcacgaggtcaggagttcaagaccagcctggccaacatggtgaaatcccgtctccactaaaaatacaaaaattagctgggtgtggtggtgggcacctatgatcctagctacttgggagcctgaggcaggagaattgcttgaaaccagaaggcagaggttgcagtgagctgagatcactccactgcactccagcctgggtgaaagagcaaaactctgtctcaaaaaaaaaaaaaaaaaaaaaaaaccaaaacaaaataaacctcttttttccctgagttgatattctactgagaacctgtttgtctcttattatgcaatctgtgtctaattgttgcatttttgaataaagatatacttagtgggtctagtaaatcatataagatagttgtgtttgttatgattttatttgatttgaaacattcaaatacatgtaaaaacaaattataattgagaattaattatggcaaacatttaataagttcctttatttgatagattaggaactaattttatttaaaaggccgtgacttacatttaaaagtccaattagctacaacattaagactaaaaagtatatttcatgactcccaggtcactgtttataggttgttgatatcccatactttgctgctgctgctgttgcttataactgttcagaaaattttcaccaaaatgtctatcaaattggaaaaccctctggagtgagatcctttttaaaatatagccaactttcacatatgcaggcatatctgtgaatgccctaggcccctgtgctttctcttctgctttttgggcttttggccttatctttgcttatgataacttcaaatggtaaacaagaagggataggtgacagagattaaacccaagccagtttgttttgttgattattattaacggtattgataaagagtttgctgaaagagggaagcatattgaaattattgcttaaaaagaagtgtgtagaattttcagttgttttcttttgataagagttgcctcatagctgttgtagtatgtgcaaatgaaggtcagcgataaatcacagaatgaatcacttccaactccttcacatctacagatataagtaagaatggaaaatattgtcacttagatgagtccttattttttttttctgtatgaatagtataaaccttacttttctggacacctagctttggcagctggtgaaggttgttaaagtaacaaatgggaccattctgcctctcccagatcgattttgctgcaagatagttgaaaataatataatccagaaatgaatttattttcttatggcaaaaacaaaacagaaagagagtactatgaggaagtatcatgctactggtaaatttttcaaactaaaaccgcattacatttcattaaatgagtttatgtccattaagcgtcaatgagcatgagtggttgaacccagaatccagtcaaagtacatattaactttctgtatgactttaaaaagaggtatgtcaacctccctgggtcagcaggttcctttgcagaagacattggaatgaaacgtcaaggacctcttccaattatagaatacctcgagatatgaagttggtaacaaataagagaaatgcagcaagatatttttagttaaaaaagaaaagattgatacaagccagtaacttgcagtgaacttgtttaaatcctcctcctctctccaaattctgtttttaccaagccggtaaagtaaagacagtttgtcatgctttgaacttcctggcttatgttgatttctatcagtatgttgccttacacatttgagtgggagctgagttacataaaactaataaaatccttacaaccccattttctgtgggtactgatagcatccaaaaaataaaaaaggcttttgccattttcaggcagttgttcctccggctagatggaaaattgaatggcattatctcaactcacatgtttaaacattaacggagagacactttctcctcctcaaaagtttttagtgttcccaggaatttaaccacagatagacacaactcctcaaacgtcccgaaaaaaaggttgactattccataaagtaatagttacagaaggctttcaaggaattagttattcacacagtaagcttctgaggcatacgagcatatcctctttcttacaacttggtcacttgatccaatctttgatgatcaccgtgggacctttggagatttatggagtttagggttacaagtatgatgtggccaccatactcagggaactggatgacagtcagccgatgggttttcaacatagatgaggatgagctcataaaaggctaaaaaaggaggcagacacctttggaagactgtttctaggctctcaaatggccattgtcaaaaaacaaacagtggggtggatttgactaagcatcagaagatgctttaacaacagcctgtgacaagtgagcgttaaaagctcacaaggcagaaaggaacttttcagagtgaccttgtcagacgaggttctaatgtgtaggctttatcagctgctctgagtgggggtaaagaggcatgcatattttaaacattcatttcatattcagtgtgtaaagtaactactgcttttcagcttgggtggagaaagtatttatcaagaatcacacaagggaaacccatgcattacctacttatagggcaaaatggaaaatgttctctctcttatgctttatcttttttgttccatcttaatagctctttatttaaaaagtattcacatcagttgattagtctgagtctttcatttgaagcaaactttcttcactttctgcccttgatactgcacatcagtctttaatcacttagacgtactgaatttttctttattcacatctttcaatcggtaaacttgaaattttgcaagtgcattcccactggtgtacattctgattttcaagacctgctacctcccccagtgtcatgcttgttttttttttctttctttcttccttcccacaccccacctccagtattttagggcaccttatgtagataagcagtgagatggcttcatcctgataattaacatgcttgtttgaggttatgaaatatacatttgagaaaggccagggatttccccctgaatatccactaactgcttgaagtggcattttcattctgacttggtattttgttttgtttgactgcagcatactggagcatagtgaaagagtctattttgaagcttcaaacttagtgctgctgcagaccaggaacaagagagaaagagtggatttcagcctgcacggatggtcttgaaacacaaatggtttttggtaagtcatccaaaagacttgacatcttttagctttaaatgtcatcgggcatcacttcactggtgtaccagaacttcttcttcaagcgtattgctatttctctacatcctaaataacaggacatttgaaaaaatgttgtcctagtgacagagcactgagagagcaaccgcatttactttatgtgtttgtttctgaaacttgcagaatagtatgatctgaatagaatgtatttgtggttagaaaaaagaacaaaagcaaaaacaaagcaaacccaaacaactaaacacacaaacagcaaataaactacatctaccagatactccattttagctgaaaacataagggattaatcgcacgagaggaagtagattcaatttaatggcaagttttttgcgtcttgtgatcaaatacagtcatgtgccacataatgaagtttcagtcaacgacagatcacacgtattacagtggtcccataagattataatactgggctgggtgtggtggctcacgcctgtaatcccagcactttgggaggccgaggcgcgcggatcacgaggtcaggagattgagatcatcctggctaacgcggtgaaaccctgtctctactaagaatacaaaaaaaaaattagccgggtgtagtggcgggcgcttgtagtcccagctacttgggaggctgaggcagcagaatggcgtgaacctgggaggcagagcttgcagtgagccgagattgcaccactgcactccagcctgggcgacagagcgagactccatctcaaaaaaaaaaaaaaaaaaaagattataatactgtattttggttgtaccttttctatgtttagatgtgtttagaggcacaaatgcctaccattgtgttacagttgcctacagtattcactacagtagcatgccgtccaggtttgtagcctaggagcaataagctataccgtatagcgcaggcgtgtagtagggtgtaccatccaggcctgtgaaagtactctgtgatgttgcacagtgacaaagtcacctaacaatgcatttctcagagcatatccctgtcattaaatgatgcatgactattgtgatgggcaaggtgaaagatgatgggggtttccaagtcctgttcagcaaacatttactgagtaacttttaagtatacatgggcccttgaatgacagtcttagtctgggggttggaattcaaacactctaaactataaataaatgataaaaccattccagagcatacaccaacataatgtggacttccaggaattttttttttatcaaccccgttcatgatattacctggaagcagagtcctcaaattgaagcctaggtctgccccacctatcttggtcaccttggagaacttgctcatcatcttggaacgacttgcctttaaagatgtatgtgcctaactgatctccaaggtctcctgcaaatttataattcagttccctctagtgcaatgaattaaataattatccacttcagttcttgcccaacagaatttctgtgtaggcttggtggtcatttgcagaggggctcattgtatcaaccagtgtggaggaaaggagccaggtcctcggggggtccctcctggccccatttgcccatttgacagccagccctttggtcaaacaggactgtcagcatctgcagtaaataatttttttgttttttttttttttgagatggagtcttgctctgtcaccaggctggagtgcagtggcacagtctcagttcactgcaacctccacctcccaggttcaagcgattctcctgcctcaacctcccgagtagctgggactacagatgcgtgccaccatgcccagctaatttttgtatttttagtagagctggggtttcaccatgttagccaggatggtctcgatctcctcacctcaggtgatccgcctgcctcagcctcccaaagtgctgggattacagatgtgaaccactgcacccggcccgcagtaaataatttattcccttgcaacattaaaaaaaaatgtggcacagtgctttatgaatattatattcatttttatgtatttaattttaatttatttatttatttatttatttgagacggggtttctttctctttgttgcccaggctggactgcagtggtgcaatcgtagcttgtgctgggaccatatgagactgggactatcctggctgtcattcataaagtcttcactgaatttttaggacttcgctgactggtctctctttatgaacttctgtcacatttagggcctgcatcatataaaatgcactgctatgtgttgttctgttagtgtttgtcatcacgccatcaggggtacacacagcttcagggcaggaatcatcatcacagaccagtagccgagactacaggcacgcgccaccatgcctggctaatttttccatttttttgtagatacgaggtctcgctatgttgtccagactggtctggaactcctgggctccagcaatcatcctgccttggcctctcaaagtgctgggattacaggcatgcaccactgtgcctggcctgaatattatatccaaataagtgagataggcttcttttgaaatactgtcctttgtttttctttaggggatctgactttttccttctctgtgcttgccgtcattgtgttactggttaccggccagcctgttaaccctgtggatccccacactttgttttacgttgaatagcatttattattgttctttcttactaaacatcccctttctgaagcagagcttcagaaatgatgctcagatgtcactcttgttagcagctggctttctgccttcaagtgatgcattattggggtttcataacagcatttttttttctcttacaaatattaaattatgaagtgcaggaaaccacatgaatgtggtagaaagcaaatgcaaacacagtgttatctggaagtgctagttttgtgattctcctggtgacagtatccttcctgtaatcaacataggaaccctctttacctgtttgctggtggttttctatcctgtatcttcctctccatttatgctgtatgccatggccactttgtcatgctgaatcgggaggtttgattaagacagttgcttggggactatctctatcaaagttctgcctcaccacaaatcctggctgtcacttacaaagtcttccctgaatcctcaggacttcactgactggtctctctctctctctctttttttttttttttttttttttttaaggcagagtcttgggtctgttgctaggctggagtgcagtggcaatcttggctcactgcaaccttcgcctcccaggttcaagcaattctcttgcctcagcctcctgagtagctgggattacaggcatgcgccaccgtgcccagctaatttttctatttttagtagaaatggggtttcaccatgttggccaggatggtcttgatctcttgatctcatgatccatctgccttggccttccaaagtgctgagattacaggtgtaagccactgcgcccggccctgagcagtctctctttatgaacttctatcacatttagggcctgcttcttacagaatgtactgctgtgcattactctgtgagtgtttgccatcagcacaattgcacatgggttgcacatggcttcaaggcaggaatcaaatcacagaccagtgtttcccaagggtggtctaatcccagtacctcctgcttccgaatctcttggatatgtttattaaagttgcagattcagcaacaccaggcttatgaatcagaagttctggggatgtagaacccaggaaactcaccttagttaacttttgcacactgaggtttgagaataactatctgaaaataattgtgcatcctcctctttgcctcctctcccacagcaaagggtccaggtctgagcctatggtaggtgtccaggaaatatttgcttgttgacctaagcaacatcaagccatgagggttgcattccctcttcagttgccaagctttttcaggatgtgaggtcagcatattctctgaacctttagaaacccactttcttccaaatacgtaaagtgttcccctagggcagaggctcttttggaaatctttttttgtctctttatcttttgtaatcactaactctgttggtggtaatgacaggagcccctgactaagattgggatagtggggacatcagctatgaggagctgggctggagcagcaggctaggagaaagatctgaggataggaaccggactgtgctaaactagaagctttatccttggctcccaaagccacacctgctacccttggcagtttattctgagtggtatttctttcagctgttaggcctcgcaggttgtcagttttggtggcagaagagcggtcccgctgctgaaaaggatcaagtttagctctagtggacgcacatcaaagcacctacagtgcacagtggtggattcaggatttgaatccaatgttagcagactgcagtggtgacacttggccctctccttccgtccgcctcttgttccagcaagggcatgcctggtcttggatgatccaggagagatttgcagggcgttgctgcttctggtgcacctcctgaatgcccttgctggtggctccagccctggtagatggaatccaaacagaagaactcacagaagcttagctagcctagaaaggaaccagcgtggccatcaggacatttattagctgttaatctaaccactaccaaatgcattaacacattttttttgacaactttttctcttttatttggctgttgcttagttcagttttgcttggagaagttgtggcaatcctgaattcagtttgtgtgaaaaagcaagcaccttcaagcccagtgttggagaagtatcttctcccaggtctctattcagttttgactaaaggaggtttggcgagcagaaaggtattaccgagtggattcttctcaaattctcatctaagtgaaggaaaaaagcccagtttgctgaagccatgttaagggcacattaggcttttaatatgtgcttcatggagaccttactagattttcctctgcgtagttctttccatctgatgggagcgagggctgtttttgggttgcagaaggcaagagccaggttgtcagctacagaagagaaaggtgccattgtctgcataattgactttgagcctttgtctaaaaggatgtcaggtggaggagtaatgaggggcgagatttttaaaaaattatagagtacaggattttagcaaaatgccagatgttggcatttctgttttggaggtctttagtggtccatgtaaactatttccttgcaagtaaccatccatggtaggaaaacagaaaaaaatgattctaaaagagcatttgtctagttagaaactgtgtcacttgtatcgtttaccgtgaggcatccttgagaggtacatgatttccaaacagccacctaaatcataggtactgcttttggaacagatgtaaataggaaaagcgccagtccagtacccccactaaagaccatcgttagaaagctctcgcagtgctttccagcttagaggagtgtagttcccttcaggtacttaagccagtgttcggtaaagcagcacccaaaatgccttttgttaaatgtgttctaactcgttcctcttgctgatgctatcacaggctaatgattgtctaagtccttcagagaagctgtgtggttttgtatagctgtgagtaaaaccacacccattcaggaaatgcaatgtactttcttctaacaggcatcatcaaaacagatgctgatttacatggtaggtccccttctttagtgacaatttgagagctttgaagggaggcatttgccgtgcatcagaagaaatcagaattaaactggcacacgtgcacattgttggagtaaaaaggaaaagcagtgacctagagtttgttaccgcacatgctttccctgaaggcatctgcaccatcatgatgtcctcatcaactctgcacacacaactagtatttctgtctctttctcttcagagtttaagctcaatgatttccaacttcctcccacatgactccagctggatatcacataggtgtcttcaatttgaatctaaacctgactttgtcattgtcctacgtttatgggctccagggtcactagctcaccatttgttgatgctggacacctcctcttcctctgcttcatccctagctcatatgctggagttctgccttttttttttttttgagacagagtctctctctgtcacccacgctggagtgcagtggcaccatctcagcttactgcaacctctgcttcccaggttcaagggattctcctgcctcagcctcctgagtagcttggattacaggtgcgcaccaccacacctggctaattttttgtatttttggtagagatggggtttcaccatgttggtcaggttggtctcaaactcctgacctcatgatccgcctgcctaagcctcccaaagtgttgggattacaggcgtgagccactgcccccagtctgagtttggcctctttaatatgatagtttacccactcttctccactctcgggcccctgttctgttgcagaccttcagcatcacttgcctggactgctgcagtggcttccaagaagccccttgcttaaagtcttttctttctgtgttccatttattctactcttttgagaattctcatatgaaagaaagggtctgattgaattactcctacacttgaaaatccttggtagtatgtggaaatatggaaaagtactcataatctaatgtgttaaaagaaaaactttagacaaattaaatttaacagagtttaattcagcaaagaactatttgcaaatcaggcagctcctctctactcctttcctcccgaactagaatagattcagggcatttctgacatgctgttgtgtggttggagaggatttatagacagaaaaaggaaaacgacggacagaaaacagaagtgaggtacagaaacagccagattggtttcagctcagcgttcgccttatttgaacagggtttgaacgataggctgcctgtgattcgccgaaacccagagattggtacaagaataggttacagcctgtttacacatccaggtaggttacggttcactgcatgcggagaaacctttaggccaaacttaaaatatggaagaaggcagctttcggctaaacccaacaaatgttaagtataaaattcatatttcaaaattgtgcaaacacattgattacaaagcagtgacaaaaatctatgcctatccacaaaggctagaagtaaagaaaacaagaatgaaggtatttttaatattagggcaattcatgtgtgtgtgtgttttttaatactcctttggtagcaaatgaatatggtgaagtaaaatgaataattgaaaggattttgttagctttctgctcctgataaggtaaaatgtgaatttcactgcatggcctctaaggcccctaggaattccttatcaacttaccatttaaatctcatctcccgtgactcccatcccttccatctctccatataatatttgttttcttcttaaacatactatgtatataataaccatgcacctgtccctgttgtttcttctcgcatgagactcttgttctctgcctggtaaactcccactcattcgttgaggcctaattgaaattcctggccaagcatggtgtctcacatctgtaatgtcagcattttgagaggctgagggaagaggatttcttgagcccagaaagtttagactgcaccattccactccagcctgggcaacagatagagagctcgtctcaaggaaaaaaaaaaacaaaacagaaattatcctcttgctgtgttaccgctattatattgcaattttctgctcatatagctatcttggtaaatgattcatgaagacagaaattgacttatcttaaaccttgtattccaagtgttaagcccattcctgcatataatacagtttaataaatatttacaaaggtaagaagaaaggaaagagcccatttagaaatacagaaataatccttcaggtaagatattaaaaatgtttttggataagcttagtactaattactatttcataaaaattacaaaaatagatgtttttggttaaacagtttttacagtaatagttggattcagcctcacatcatttaaactaaactactggcgtatatctttggcattagaaaattctaacatcagatagaattgcttcagcttcactgtaagccatatttatgaagttactaaaaaccatttttttaaactgttttatgtcatgcataaccatgtcggccaaatcagaaatccaaataaatgacacatccagttctggccacattttgtgaatatctggtatttttttcttaagggaatttaaaaagactgggtaacattaaagggttgatgtaacattttcaattctgaaaggctactctgctctaggaatatacttgttactattttttttttcatttctaagaattctgtttggctaaaataccaaaagagaaaaaaataacttggcttaaataaaatgaaaagtcatctccaaaattaattcggctcctcaaaagttctttccaaaggaaggaataggatgctatttaatattacatgtcaaaaacaccactaaaaagaaaatcatcatttgtacgtgtgacaaggaattcagaatggaattttatgaaggctagtgtgtgaggcacgctgctcacatcttttaaaataatattttgatatcggggaagattatttaatactatatattattttatattatatatgtatgcatatgtgtatatacatatataaaatagagttttttcctattaatgctttagagtcaataagttgtaatggggaatttcagtttgagatttgtcattttttttgcatgatagccttgcccagccttcagttttcttgtttataaagtcatgccaaaaggtgaactgtcactggattaactaattaagaaattagtcagtcactaacatttattgattgaccactgattggaaacattaaatacccacatcattttttagcatttcatgtaagttgatccttgtctgttttgcagagtaaagaaccttagctgaatttcatttttgtctgtcctgatctttgcattcatttaaaaacctgacccttcagctgtttacaagatccatcatgaaatataccatggctaaggtgaatgtgcagactcccagtttccctttagctattctgttgcactagccatggggttgcaaacttttttggtgactgttacagttcattcatcaggaggtactgactatattttgttgcactttcatgagagccagggctcagaagcatcctaagtacctagtgacaaaaactcaggaaggcaattagactatgacgcttttcattacaacctaaggtgcctctcaatatagtaggtgcttatgttgaactgccctctgcagactgtatgtgtgggtccatgtggtgatattgtggctgtaccctctccaaggttgcctagtgttggctgtagcaggaaaggaagtgtctgtaagcaatagtagcttcaatgaggaaggatataaaagagaagtgaactagtcctgaaatcttaaggatctacatacagaccagagtaccttgatggatcccaaagttttattttattttattttgtttttgagatggagtttcgttcttgttgcccaggctggagtgcaatagcgcaatttcggctcactgcagcctccgcctcctgggttcaagagatcttctgcctcagcctcccaagtagctgggattacaggcacctgccactacacccagataatttttgtatttttagtagagagggggtctcaccgtattggccaggatggcctcaaactcctgacctcagatgatccacccgtctcagcctcccaaagtgctgggattacaggcgtgagccactgcgcccggccttattttatttttccagcattattgagttatgattgacaaaatttgtgtacaacacgatgctttgatatacatatatattgtgaaatgtttattatcatcaagttagttaacactttcatcacctcacatagttattttttcttgcatggtgagaacatttaagatttactgtctcagcaaatttcaagtgtacaaatatcattattaaccatagtcactgtgctgtatattcaatccccagatctcaaagatttaaaatctagccctgagacaactgattacagccaccatatgttttcttaggtagttcacaataaatagttataatgctgctgagaaacagtatgatgtgttgaaaagtgtaggttcttgaggcaaacttcctgggtttgaataccgaacttccacttaatggctgtgtaatgttgagcaagtgacttaatctctttgggtctcagtttatcaatccatgaaataagaaaaataaaacaggccaggcacggtggctcacgcctgtaatcccagcactttgggaggccatggtgggtggatcacaaggtcaggggttaagaccaccctggccaatatggtgaaaccccatctctactaaaaatataaaaattagccgggcgtggtggcaggtgcctgtagtcccagctacttgggcgtctgagacaggagaattgcttgaacctgggaggtggaggttgcagtgagccgagatggtgccactgcattccagcctgggtgacagagcgagacttcttctcaaaaaaaacaaaacaaacaaacaaacaaacaaaaaaacctaaatgagtcttgatgcacgtaaagctttcaaaaaatggtagctgttattatcataccactttcatggaatttcgttagttactcagtttgtggtaaaatttttccagtgtttattcttcatgccttcctacaaacttggtttaggaatttacactgttaggggaaacatgtaggtgaacccagctagggaaggcgaagcaatgctgtgggaacacaaaggagtgggatatttagtctgatttgggagtggtgaggacttggaggaagcatcagagctgacttggaagaatggctaggattccacctgacagagctgggagcaaggcattccacacgggagggcgtgtgcccaaaggtgtggagaagggagagtgcagagcagagcatatttgaggaaagctgtggaccagtttgagcccagggttaaggtgtgtgaggtggaacagtgggagactgggaggaagatagtctgatttaatgataatgatgataacggtgagtgtgaactattcactgagtggtgccatatatcagattctgtggttggggctttacataaattagctctgattacaactcccttcaacatagctatccacattttacagatgagaaaatgggattaattccattttttcttaagtggcggagagccactgaaggttgttgaataggagagggtcatgatcactcttagcaggaatttacttatctgctttttcacttccctggagtggtagacacgtcttttgttttgtttaagagacagagtcttgctctgtcacccaggctgagtacagtggtatcatcatagctcactgcatccttgacctcctgagcccaggtgatcctcccaccccaacttcccagagctctggaattagaggcatgtgccaccacacctggctcatttttaattttttttttgtagagatggattcttgctatgttacccaggctgttctggagccctgtgttccagcaattctcctgctttggcctctcagagtgctgggattatgggcatgtgccaccacacatagccttggagatacatcttgcaccatcctgggctccccagaggagtggtattagactgtcagtatggtgaatactccataaatactggtggagtctgttttcaaagcttccttaacaaaactctggaaacatgttttgtacaatttcctttttaaagaagaaataaactggttaagttactgagcaactcctttttgcctgtgcatgtttcatctcatttgatccccataggaaatcttaaaggtagagagtgtaatttttgcatttcaattatatgttattaatattataatggatgaggtcactgggactgaagaaagtaatgctgcttggagatggtaaagctgggattcaatctgtggctccctcacccttggtctgtagtcggccaccacccctccctctattgaacctctcttttattgctgttttccagtctccactaagtatttcttccactggtttaagtccacgttgctaagcaagtacacagttgcttttaaggaaacgaaagccccacaaggacccagtctactttgcagaggttaaatggaaatagattattttcaataatctgtcctcaggaccagaattcttctaaatgatgctgctggcagctggccatctctgggagcccatcagacaaaccacttgtaggagcccagcatcctgcattgggtcagaatgcaaagtcaactaactcttcacagtagatgcagtttgggcgtgagtacctagcaggaaccctagatatttggggcaagcactttgcttcttccatctggtggaacccacgtttattatctaaaagacacatggcaacaggcaatgcagtgtttgcttccaaagacagcctggaatttggaatgacatttagtgaaaggggaaagttcaatttcagctatcaaaggtcatggccagtgaacctacaagcacatattatgtaaatttggcccaaatctgtatttattagcttgaacagttttggagtggttatctgctctacaaaaatgatctaccgttaagagtctcaaaaatatcaagtctgcttgatgcatttaaatcaggaagcgtaaatatttggcatccatgctagtgctgattttcagaggctttgctcacctgcagctgtgctcactttgcgaaaatggacatggtgacctctactttcctggtgagtggccacgtcagtatcatcccttcccgttcctggcaccactctcacccactttggagagccagcatagagcagcacgctgtgtctcagggaccaggctatccatcagataccctactctgaaagtgtccttaatttgatttttaaaatatatataaatatatagtgtgtgtgtatacacacacacacacacacacacaccataaaatttaccataaatttaccattttaacctttttttttttttttttgaaacggagtcttgctctgtcgccaggctggagtgcagtggcatgatctcagctcactgcagcctccgcctcctgggttcaagcaattctcctgcctcggcctcccgagtagctgggactacaggcgcatgccgccacgcccagggaatttttgtatttttagtagagatggggtttcaccatgttggccaggatggtctcgatctcttgacctcgtgatctgcccgcctcagcctcccaaagtgctggggcgtgagccaccacacctggcccagtttaaccatttttaagtgtacaattcagtggcattatgtacatttccagtgtagtgcaatcatctccactatccatttccagaactttttcatcatcccgaacagaagctctgcattcattagacaataacactccattctctcctcccagcccctggtaacctctattgtacactgtgtctctatgaagtttcttattttagggaccacatggaatcatacaatatttgtccttttatgtctggcccataatttaatttttaataacagtgtttcaaatatactgttcttttccaaagtatttgttatcaatactttattatgtcagtaattatcaataagttctcattctaatttcagaaactgggttgtattggaatatgggcatagagaagatacagatttttttttcttcttaataactgaagagaataacatttatcaaacaaacgatcgaactctttctgagacatagtttcatgtgcctctttggagttgatttcccctcactttattttaactcctatttggcccgaattcttctcagaatttctgcaagcaggctcatagtcctgcgttcttctcttctctttttttttttttttttttttggcagggtctcactcttgtctcccaggctggagtgcagtggtgcaatctcagctcactgcagcctcgacctccgggcctcaagtgatcttcctgcctcagcctcccaagtagctgagattacatgtgtgcacgacaacacctggctaatttttgtattttttgtagagacgaggtttcatcatgttgcccaggcttgtcttaaactcctgggctcaagcagtctacccgtcttggcctctcaaagtgctggaattacaggcgtgagccaccgcagctggccaggcttacatttctgtagtgcctgttaggaagagttcagaattttttagacacaggcatagctcagagatattgtgtcttttttttttttttttgagttgggagtcttgctttgttgccaggctggagtgcagtggcacgatctctgctcactgcaagctccgcctcctgggttcaagcctcccaagtagctgggactataggtgcctgccaccatgcccagctaatttttgtatttttagtagagatggggtttcaccatattggtgaggctggtctcgaactcctgaccccaggtgatccacccacctcagcctcccaaagtgctgggattacaggcatgagccactgtgcctggacactcagagatattttgggttcacttatagaccacagcagtaaagcaagtattgcaatacagcaaatcacacaaattttttggttttccagtgcatataagttatgtttacaccatactatagtctattaattatccaataacattttgtctaaacaaaagtacataccttaattttaaaatgctttattgctaaaaactgttaacgatcatcttcattgaaccataatcgttttgttggtaaagggtctttacgttgatggctgctgactgatttagggaggtggttgctgaaagctggggtggcggtggcaatttcttaaaattagacaacaatgacgtttgccacatttattgactcttcctttcatgaaagatttctctgtagtatgcaccattgtttgagagcattttacccatagtagaactttcaaagttagagtcagtcctctcaaacctgtcactgcatcaattaagtttatgtaatatttcaaatcctttgttgtcattttaacagtgttcacagtatcttcatcaggagtagattacatctcatgaaaccactggtttttttgtttgtttgtttgtttgttttgagacggagtctcgttctgtcacccaggctggagtgcagtggcgcgatctcggctcactgcaacctccacctcccaggttcaaacaattctcctgcctcagcctcctgagtagctgggactacaggtgcgcaccaccacgctgggctaattttttgtatttttagtagagatgggtttcacaatgttagctgtgttagccaggatggcctctatctccggaccttgtgattcccctgcctcggcctcccaaagtgctgagattacaagcgtgagccactgtgcccggccatgaaaccactttctttgctcctccatagaggcaactcctcatctgctgaagtttgatcatgagattgcagcaatcaattcagtcacattttcaggctccatttctaattctggttctcttgctgtttccacctcatctgcagttccttcctccaccgaagtcttgaaaccctcaagtcatccatgggggttggaatcaacttcttccaaactgatgttcatgttgatattttgacctcttcccatgaatcaaatgttcttaatgacatctacaatggtgaatcctttccaggaggttttcaatttacttttcccagatccatcagaggaattactttctgtggcaatgatagccttacagaatgtatttcttaaataagaagacttgaaaataaaaattactccttgatccatgggttgcagaatgggtgttgtgttagcaggcgtgaaaacgacatgaatctccttgtatatttccatcagagctcttagatgagtgacgaagtgcattgtcaataagcagtaatattttgaaaggaatctttttctgagcaattaagtctcaacagtgggcttaaagtatttagtaacccaatgtgctttcatccaggctttgttgttccatttctatagcactggcagagtagattcagcataattattagggctctaggatttttggaatggtaaatgagcattggcttcaactaaagtcactagctgcatttgcccgtaacaagagagtcagcctctcctttgaagctttgtagtcaagcattgacttctcctctctagctatgaaagtcttaaatggcattttcttccaatagaaggctgctttgcctacgttgaaaaatctgtagtcaccttcatcaatgatcttagttaaattttctggataacctgctgcagcttctacatcagcatttggagaagatttctttccttaaatctcacgaaccaacttctgctagcttcaaacttttcttctccaagttcctcacctctctcagccttcatagaagtgaagagagttagggccttgatctggattaggctttggcttaagggaatgtatggctggtttgcttttctattcagaccactctaactttgtccatatcagcaacaaggctgtttcactttcttaccattgatgagttcactggagtagcacttttaattttcttcaagaacttttccttagcattcacagcttggctaacccttcagtcacaagaagcctggcttttgacatatgtcagctttcaacatgccttcctcgctaagcttaatcatttctagttttcttatttaaattgagaggtatgtgactcactcttcctttcacttgaatgcttagcggctattttagggttattaattggcctaatttcaatattcttttttttttttcttttttgagacagagtctcgctctgtcacccaggcttgagtgcagtggcacgatctctgcttactgcaagctccgcctcccgggttcacgccattctcctgcctcagcctcccgaatagctgagactacaggcacccgccactacgtccggctaactttttgtatttttagtagagattgagtttcaccatgttagccaggatggtcttgatctcctgaactcgtgatctgcccaccttggcctcccaaagtgctgggattacaggcgtgagcccccgtgcctggccaacttcaatattcttgtgtctgaggaaacaaggaggcccgagaggagggagagagaacagccagtctttgtagcagtcagaacacacatgacatttactgattaagttcattaccttatatggggtgtgtggttcatggtgaacaaaacaattataatagtaacgtcaaagagcactgatctcagatcaccataacagatataacagcgcaaaagtttgaaatactgtattaccgaaatgtggcagaggctcaacatgagcacatgctgttggagaggtgatgctggtggagttgcttgacacggggttgccacagaacttcaatttgaaaaaaaaatgcagtatctgcaaaggacaacaaagtgaaatgcaataaaatgagatgcgcctgttgcatctttcaactgatgtgtcctttcttttcattaaaaaaaaataacgttctgtccatctgcctctgtccaacaacaggcagtcacatgtgatgcctactgttggagaattggtgaatcataggcctccacttctggtgctattactcagagaagaagtatttctttctgcatagaaggaaacattgtaattttactgcagcaatgaaattgtagtagaggtgaacataattcttctatttacatctttaatgagccacaattaaaagtagtgagttggcatgtcagagtgaatgtgttattttcagatttctgttagaacaatggctgctgctggttgaagctgcacttccctggccccttggagctccaaaagccttaagaaagaaacccaggggccgggcgcaatggctcaggcctgtaatcccagcaccttgggaagctgaggcaggcgaatcacctgaggttgggagttcaagaaccagcctgaccaacatggagaaaccccatctctactaaaaatacaaaattagccgggtgtggtggggcatgcctgtaatcccagctacttaggcggctgaggcaggagaatcgcttgaacctaggaggtggaggttgcggtgagcctgtgtctggagttggttccttccgataggtttgtggtcttgctgacttcaagaatggagccacggaccttcacagtgagtgttacagctcttaaagatggtagggacccaaagagcgagcagtagcaagatttattgtgaggagcgaaagaacaaaccttccacagcgtggaaggggacccgagcgggttgtctctgctggctggcgtggccagcttttattcccttatttgtccctgcccatgtcctgctgattggtccattctacagagcactgattggtccattttacagagtgctgattggtccattttacaaacctcaagctagctacagagcgctgattggtgtgtttttacagagcactcattggtgcattttacaatccccttgtaagacagaaaagttctccaagtccccactcgacccaagaagtccagctggcttcacctctcaataccacttctgcatttaattatagccaccgactagctgcactatgatattaatctgggctacttgcttaggaacctgcagatgggtttccataagctagacattgctgcctgataaatgactgtgggatacaggttttcctgatgaggtagtaaagccacatattggaattcatttaacagctcgacaacataatttgtaaacatttctatttagtcacgtgtactcagcaaaaatgtatactaaagtgtttaccatatacttggcattgaagggaattataatgaaatatgttgatcttggtcatttataggtgttcccaccactgtgatgtgtgcatgcattgtgggccaggaggttttatctggaagctagtgacacttcagcgtcaaggcgtctcgctcctgcaggccctttgtaagaccctgtacctaattttatgttgataattttgtgcagtttttttttttttttttttttttgaggcagcgtctagctctgtcatccaggctggattgcagtgttgtgatcttggctcactgcagcctcaacctcccaggctcaagtgatcctcccacctgagccttctgagtagctgtgagcagatacatatgccaccatgctcagctaatttttgtatttttttgtagagatgggggtctcactatgttgcccagttttgtcttgaactcctgggctcaagcgatcctccacttcagcctcccaaagttctgggattacaggcgtgagtgaccatggctggcctttgagatcttttcttaaagaccctaacaccccatacacactcctctaccccttgactagttttataaactgcagacctcacagactggatccacccctgattatgaatatgtttaaactgtgcatatgtatgcattaattaaaacatatttatttctctttcatactagtatgtgaaattccaaaaaatctgctagcccacaaattaggaaaattaaagggctatgcctacctctgccagctgtttccaaggaaatttatatcttggacatttggcagataataatatcatgtttgactgatagtgatcatgtcctaaatttcccaaactgatgagtcacaatcgtgattcacatatttctgggaatcgccccccaacaacttgcgatttgcctggcgtagctgtagtatatcagagttttttaggtgtttagcagaactgaactatatagcttcttgtcccatgccaattcaagaaaattaatttaatagctattttatgaaacattttttcctaactcgacatggatattttaaggtgattttccctgctaagaattcacttgttataggtgactctaattggagaaacagctgttgacttctagtgtgctcaattagtttctttcttcctttttctttttttattttattttatttattttttattatactttaagttctagggtacatgtgcacaatgtgcaggtttgttacatatgtatacatgtatcatgttggtgtgctgcacccattaactcatcatttacattaggtatatctcctaaagctttccctcccccctccccccactccatgacaggccccggtgtgcgatgttccccttcctgtgaccaagtgttctcattgttcaattcccacctatgagtgagaacatgcggtgtttggttttttgtccttgcgataatttgctgagaatgatggtttccagcttcatccatgtcccaacaaaggacatgaactcatccttttttatggctacatagtattccatggtgtatatgtgccacattttcttaatccagtctatcattgatggacatttgggttggttccaagtctttgctattgtgaatagtgccgcaataaacatacgtgcgcatgtgcctttatagcagcatgatttataatcctttgggtatatccccagtaatgggatggctgggtcaaatggtatttctagttctagatccttgaggaatcgccacactgtcttccacaatggttgaactagtttgcaggcccaccaacagtgtaaaagtgttcctatttctccactttcttcctttttcaaagagttcctttattattcccaggccgtcgttaggtgtaaaagctaatttagtttagattattttttaaagtgcacctggcattcaagctatgacatttcctgttgaaacagcactgctatgacctgggaagaaaagatcccaagaaaatataactgaggaatcaaatatttgtctgtataaaaggtttcatattaattcatgataccatttattagtcacttaccttttatgttagtagccataaggaggtgtgatggcatagactattcagggcgaatgacagttgtcatgggcagaaggtgcccatgcatcaggcagagcagggtgaccacaaagtggggagtggccaaatatactttgtcctactcaagacatgagggcctgtcccagtggcttgcttgagaacaaagctcatcctgatgactcagcagccacagtgaagggctgcctgggggctgggggagaaacaagtaggcagatgaggtccagttggaaactaaattgctttgggaggaggagagtggtcacacaatgtaggtttcagttccggctgcactgctaattttgtaaccttgggaaagttaccaacctctctggaatctcagtttcctcccctatgaagaagaaagcagtagcccagatcatccttggaggttccttcccttcagctgtgacattttgcatttgaaagagtaagagaagtcacaggaccatgggaaaggaaaacagaaatgatgtaagggaggcaggtcatggggagggtggtcaggaacacaggttggaagtgcccgtggtgtcaattcaggtgttcggtgatctccacgggcgagtgacttttattgggagaactgtgcactgcctgaggttagggttgtgctctggggaaaccggaaccttgaaaacaccttgtagggagccgcgtttcccttgcacggactgtgctgcctgtgcttccccagcacagtgggcgtcgtcgctttgtgtttgtgctggctgctgtgcggggttgcctgcctccccagcccacacctgctcagccttcctccactcatgttttcaggatgcttttggatgcttctggctacagtggattttccttctccttctgaagcccttttgaaattatttctctgcagattcagacatatttatttatctggtcaatgtcctgcctaaagaatcagataacgactgtgtttttgcctgaactcacacatatgaatgagcttttgtaagcggcagcagcagtgtaggtttagttggagctgtctgagcccttgtcaggttgctacttagttgtttagttagctctcgttgaacttctgtcacatcctcagtttctgggcagtgtgtaagaagagctccttctctctagaccagtggtccctaacctttttggcaccagggactggtttcatggaagacagtttttccacagactagggtggagcgggggatggttttgggatgattcaaatgcatttatattcattgtgcactttatttatattattatgttgtaatatataatgaaataattatgcaactcaccataatgtagaatcagtgagatccttgagcttgttttcctgcaacaaaacggtcccatctaggggtgatgggagacagtgacagatcatcaggcattagattctcataaagagggtgcaacctacatccctcacatgtgcagttcacaatagggttcacgctcctatgagaatctcatgccgttgctgacctgacaggaggcagagctcaggtggtaatttgaacaatggggagtggctgtaaatacagatgaagctttgctcattcgcctactgctcacctcctgttgtgcaggaggtctgtagcccaggggttgggaacccctgctctagagcttaataatcaactggtggagaccagtgcaattgtaaacaaaagtgacaaaacgatagtaataatgccaatggtaatgaaagctacagacattttcagagtgctgtgtctccaagtactgagctgagcactctgcactcatgaaatatgtatcctcctcacacacacacacgcaaaataaatgtttaatggaatattgatcaggaaaaaaacaaccagtaagcaaagtattaatacatgctacaacatagatgaacctcaaaacatcatgtgaattgagagaccacatacttcaatttcatttatatgaaaggtccagaatagacaaatccatagagacagaagttagtttgggggttgcagaggccggaggtgggagaggaatgcagagtgactgctaatgtacacagggtttcttttttggagaagaaaatctaaaattagattgtgatgttggttttacaaaacagtgactatactaaaaaacatttgagttatacacttgagttatatgtaaattaaatcttaataaagctgtttttttaaaaataaatgtttaattctcagaaacaaccctatgaggtagggagtattatcctcctacagatgagaaaaccgaggcccagaaaagaggagaacctgctcaagattacatataaggcatatgtaggattaactttttcattacagagaaatccatggtagtgcttgctaagtaaatgctaaatctattgattgcatggatgccagaactagatggggttagtttagatggattaagggaggaagtggtttaaactgtgttttctaagaagaaagagtagtgattgtataaagaagacaaaagggcatttcaagctggagataattgcttgtgagagttaaacatcaagaaaccagacatctaataggtttgttcaactggagtgaagaatagcctttcatatgacaggtaggtaatcagaagcaagtgaatttagagttatattgttagctgtagtgcgggcttgctgtaattagtagcaggccgacaccttgtaacatctctctggagtgtaaagacatatttctaacagaaatgtgttagtctgcaaagcaaataaggtgcaagcgtaaatgtcctttttccttggactgtctttaccgaatgacatgagcttcacacccttgccttgagctgtcactatcattgcttcactttctattaattagctcggagccttggttctatagtcaacttgaaactgctctggacatatttgctctaatcctcctggacaacctgtgagatgtgccttttcctacacttctgccttgccctggcagccacatgacacactctcgcaaggcaggaacctcagggaggggaggtggcggtgtctgttggcaagtactcagctccctttgaggctgcagatagtaggcattggttaagagtttaaacttgggcaagaactggaagcaaattgggaggacctggaattgtgggtgcttggggaaaaacattacaatgaggactcatatgggtcgtgtggtcatgtttgtttcaagggctttcccttccaaaactggaaaagaaaactgataaaacaaacattgggtggcatttttttctaggcttgtcaatgggtgacttgtttgccgaattaattaaataattaattaattaccttgtttataatcttccttgttttgaaaagatttatggcagtgccttaaatctgtaaatctacccaacaagagaatcttatgaagtaaacaagttaacaggtgaaacatgcctccttttaaatgtttctttataacaaaatgaccatatatcaataacagactgtaacaatgcgtagcaaatgtatttatgtttctcatctattttccactttcaaaaatgtgcttttcccttaaactccaaattgtcttaacaatttcacattttcatttctttcttttcttttttttttttttgaggcggagttttgctcttgttgcccaggctagagagcaatgacgtgatcttggctcactgcaacctccacctcccaggttcaagcgattctcctgtctcagcctcccaagtagctgggattacaggcgcatgccaccacacccggctaatttttttgtgttattagtagcgacgaggtctcgaactccagacctcaggtgatccattcacctctgcctcctaaagtgctgggactacagatgtgagcctggcccaatttcacattttctaggttctgtagaggttcatgtttgtggcatggtaattcttgttttttgcattttttttttcttaacccccctcctggcttttggagcactataaacttagcactggtggggccacatcttgacagcgagacccttacagcccccaaccccgcatcccagtggggcttcatgatctggccctgctgtgctggtggcatggccccctcggggcttaagtgattctgggtcattgacaagaatcttgcctgtgtgaattcaaatcaaaactttggagagcaaagattcagtgttttccttctgcctaacaatctcatggaaagcacagtggtacctagcatttagctcatgtgttcatttagcaggctctaagtcatcttgtcacatgtcatcctcatgtcagctctgtgtggtgttgtcgacccacgagcaaacgttgcaaggtcccctttagggtgacaaggctgattcaggatgtgtctcactgccccaggaaggatgcctctaacatgcggaacatggtgccagtggctgaggggattagttggggaagaagagtgaatagggaaaggaggttgttacatgatccacccctcactggccagagaggaaaaggaaggcatctcattaagagcattagctgtagcctctcatttaaacctcctcactaccccatgaagtaagcattattgcttttgttttacaggtggtgtgagacaaaagtgaaggaatgagactaattaataataagaatccatgccccaccatagctacgatgcagtggagcatggattctaaaccagctctaacatcacatgccctattttcgagcactagtggcttatttctgagctcttctcttcctctttcctgttgatgcttgagttttagttatatcatggcaaattgaaaaattcttcaaaaaacatacagaggaaataaagtggtgggatctgaaacaaaactcttattgattagccattctaatgaagatttgtggctgagatgggagttttgcaatcaccttgggatttcagaaccctgcttttaataattagaactaaagaagggagagtcctatagaagtgtgggtcataaaaccaaggatgtgaatgaggagtggcaagacaggtatcctggagactttatttcagtgagacttctggggcagagttgggactgatgggggacaagtcagctttggaatgatacagaatttttggctgtgacacctgtgtgattttagtgctttgcaccatatcaagagctgagcagagtgtggcaccaatattcaagggactcaaggggcaaatataggtgtcagtgagtgaaagcagatagcgagatttgcaatgcagtgtccaggagtgtccatctttctagacccatttctacttataagatcactgcataccctgtgaaacattatattcatgaagccacagagtttgagccactgtgtttacgctgcaagtggaaggagagtgggcatggagtcagaaagactcaagttcaaatccagcctccataatttatcgtctttaagaccctgggaaagttgacctaagcctctgttttctcagctttaaaacatgaataataatcctgcctcacaggactgctgcacatacggcagtcagcgcagtgccaggcacacacgagtgtcttattagttattattattatcaacaaagagcataggtgatccttcttatcatgattataaaaactgtggcttaccaatgaaagggtccttcataagccaacaaagagacatccctgaaattttcactatagcagaaatgcaaattattactgggtacatttctggcagacacatgagccatttacataatgaaacctctctaatattatttctattaatagcaatacttctgagtatcaatctgaccattttgtatttagaatcattctctctgtgaacagattccttttattgccatgtcgtcttaatatcttctgacaagtatcattatctctttgctgcatattctaatgtttatgattgcatgagttttaaagtgttcatttactacctgagaacctccattttaataatgcattgctttaatgttggtgtttgggaggtaaggttgttgcttattttctcagatgccgattcacagttgagcagatgatgacttgcaggaggctctcttgacctgtcatgctctgatatcatcaatgcattggagtggtcacttctgttagcttttcctccatgaatcccctgttgatcagcccactaagtgactcagcatatgtctgtgcacacctttggaccacattatcatccactcacttaggcccttgaatttttttatgggtatgtgggctatattgctaagtgataaggctggttctgtaaatggacctcgcaacttcagcataacaacggtatggctagtgtcctcctctaggagggactccccttgagggcagatacaggtttttcctgtttgcctcaagagagtcatacaatgcagaagtgcccaagtgaatgttgggtgaatcagtgagtgtaagagggcacccaagggaatgcccacagttggaaggaagttgcctgagaggaggagtcctcagacccattctagctttgtgattctgcccgtacagacatgatttatatgacaggaaaaacatggcaggcccttgggaagcattttcatcttaacctttataatatctaataaatgggcaagatgttaaaaaaaattgccctttccagaagaaggttatacagactctaagaaggcaacattaagaaatttttgaatttttttttttttgagatggagttttgcttttgttgcccaggctggagtgcagtggtgtgatctcggctcactgcaacctctgcctcctgggttcaagcgattctcctgcctcagcctcccaagtagctgggattacaggcgcacaccaccacgtccagctagttttttgtatttttagtagagacagggtttcatcatgttggccaggatggtctcgaactcctgacctcaggggatccacccacttcagcctcccaaagtgcagggattacaggcatgagccaccttgcctggccgaaatatatatatttttaaaaaggttattttcatcccagcactttgaaaggccaaggtgggcagatcacaaagtcaggagttagagaccagccttgcaaacatggtgaaaccccatctctactaaaaaatacaaaaacaattagctgggctggtggcgagtgcctgtaatcccagctacgcgggaggctgaggcaggagaattgcttgaacctgggaggcgaaggttgcagtgagccgagattgcaccactatgctccagcctgggtgacagagcatgactctgcctcagggggaggcggggagaaggttactttcaaccccatgaaaaagtgagcaaaggacatgaacagacacttttcaaaagaagacatatggccaataagaatatgaaaagcagctcaatatcgctggtcattagagcaacgcaaatcaaaagcacaatgagatactatctcataccagtcagaatggctgttgttaaaaagtcaaaaaataaccagttggatgctgatgaggttgcggagaaagggaacacttatacactgttggtgagtgtacaaattagttcagccattgtggaaggcagtgtggcaattctgcaaagagctaaaagcagaactaccattcgacccagcaatcccattactgggtatctacccagaggaatataaatcattctaccataaatttagacacatgcacgcaaatgttcattgcagcactattcacagtagcaaagacacagaatcaacctaaatgcccatcaatgacagattggacaaaaaaaatgtggtacatattaccatggaatactatgcagccataaaaaaggaatgagatcatgtcttttgcaggagtatggaaggagctggaggccattatccttagcaaactatcacaggaacaaaaaactaaatactgcatgttctcacttacaagtgggagctaaatgatgagaactcatggacacaaagaagggaacagcagacactgggtcctacttgagggtagagggtggaggaggaagaggagcagaaaaaacaattattgggtactaggcttagtatctgggtgacgaaaccatctgtacaacaaacccccatggcatgagtttatctatttaataaacctgcacatgtacccctgaacctaaaataaaagcttaagaaataggttattttaaagactatcctaatgcatttgtttgtgtgtgaaatatggttttgctaattagtattctttattgccagtaaaagtaactcactagagggagcttctaagaaacggggattttgatgagggcacgtggatatcccatggattttagggacgggcacggctgggccttggggaaacaaaacaaaacaaacaaataaaccaaaaatcaaaaccaaaaattcacattgaatttggagtttgggtcatattgtatgaacaggactgcttccacctgcattaataggcaaattccagaatactgggtgctgaatgaacagtccagtatggatctgtacggaggctgtaccaaggattggtgtctgtttatttttatttgtgctgctattgaagattttctaatcattagtgctaatattgcaggagaaaataattaatgaaggtgtctactgttctattgtagtaatttctgtttgcagggctcattaacatctttgatcagaatgagcagctcttttctggttggaatagatgaaaattatacaatgtatggagccattcttcaccttgtccttgtttcttcttcatgttgcttcgacttattgctcacaagttgacctcccccttagagctggggtggtccagcagggctgcgttgtgatgtgtattccttttgtgataggagacttgctgagagaggatcctgtttttttgtttgtttgtttgctttgagatggagtcttgctctgccacccaggctggagtgcagtggcatgatctcagctcactgcagcctctgcctcccaggttcaagcgattctcctgcctcagcctcccgagtagctagtatgacaggcgtgagccaccacacccggctaatgtttgtatttttagtagagatgggatttcaccatgttggccaggcaggtctcaaactcctgacctcgtgacccgcccacctcggcctcccaaagtgctgggattacaagtgtgagccaccgcgcctggccgaggaccctgtctttaatgggatgttgggtgatatgtatgaaatggttcaagaagcagatgggaagtgtttgggaggcctactgccagtggctcagtgtagccagggaaaaacagacacacctctgtgccatctctcacatcttagaaggtaacattgagtttgctgcatagaaccatacagttctaggtcacctgaaactcagagctcatgtgatctaaacttctatatttaaaggaggaaagagactcagagaagtaaaaatggcttgaccaagaagtcagactggaaccagaagtggacatatggactcctcattcctgttccagtaccgttgctgccagttcacattgtctttctaaaatagccatttatagggccacagctccatctcaaacaagggcttagtatctgtcagtttgcgaggtctaccataacaaagtaacccagactgagtggcttaaacagcacaaacttattttcttatgattctagagacagtaagtttgaaatgaaagtgtcaggaaagttggttccttctgaagtccttctccttggcttgcagatggccatcttccccctgtgtcctctcgtgggcttccctccaagtctgtgtcccagtctcctgttacaaggacaccagtcatagtggaatagggccctttcatatgaccttattttgttttaattacctctcaaaaggtccaatttccaaatacagttatattctgagaaactggaagttagggcttcaacacatgaattttgagtggttgtggggggaaaaaattcagccagtaacagtatccataagttaacttgattcattagttgattaagtatgattaaaccagctgggcgcagtggctcatgcctgtaatctcagtactttgggaggccgaggtgggtgggcacatcatctgaggtcaggagttcgtgaacagcctggccaacatggtgaaaccccgtctctactaaaaaaacaaaaattagctgggcatggtggtgcgtgcctgtaatcccagctgcttgggaggctgaggcaggagaatcacttgaacctgggaggcagagaggttgcagtgagctaagatcacatgcaccactgcactccagcctgggcaacagaggaagaccctgactcaaaaacaagaaataaagtaaataaataaatattattaaactagattatattggttaccaagtctttacatgaccattttaatagccttttcagatgttaactttgcaataatatgcagccagctaattgaaaattctagtgccataaatgtttttaattgcttactatgtgtcaggcgttgtactaggcactggggaaaactgtaaataaaagagacccagttccttcctttttttcaggttgcagtctatcaggaaaggcagacatttaaaaagggtcttgtgaggactgttatgaaacaggaagtacgagtgccatttctataccttagtacaatcactcgttttaattcacatcttccatggtggcaagtttgcctcagtgtcagccggtcaattgccactcaaggggatcagaacatttatgtatctggaatgcttggtacctagagttctgaagatcactattctcattccaaatatgttttttcattgccagaatgctcactcagtgactggattagttatgtgtactctgcatttttcgaagaggggaaagctgctatttttatcatctagtagcattctgatgactccttgataacatggttactatacggaaccccatctgtttctctgctgggaccacatcttagtcatatttttgtccctaatgtctggcatcgtgcctggcatttagtaggtcttcagtaaatatttgctgaataaatgtatgctgattgaaaaattgcctgctattatcagctctctgtgcatgataaatgccttgcctctccaaagcgattgtaagcttctgagcaggaacaccatggtcacacatggtctgtctaactcagcgccttgtaaataataggaatgccatccctaaatccctagccccctccaggatggcctgtcttccttgcatctgggactgttgaagattcttaatgatggaaaaatcatatacaggttattgcatagacatacattaaaaaatgtagttcgttcagtgtatccctagtgggcctatggccataaattaacttgctcccagggtaggtagtactctcttcttcacttctgctgtaatcacagctgccttcattatagaatcatagagaagtgaattaaggtgaactttgaaagaaggaagagatgcagctcacttgatcgatgtgggagtgggagtgggaagatttttctaggcataaggatggcatcaaagaggcttggctgtttttccattcccagtaatcgttgacagttttttatttaacatttaaaaaagtgtcctccgaaccttaggctgttcaaaaacaagtatttcatggtagagattacgtcaaatgataagcgatgcattctgcgatcagtggcagaaacaaaggttgaagctgcagtttgatgagaatttaaacatacagaagtcaaaaaattcaggagttgaagttaaactgcaagtgtgactcagtcccctcgggcatatggtagtagcattttctgaattgtggcatattcagttaaatttaagcccttgtttttgcagagtcgttgtgtcaaggttgcaatgtgagcagtaactttagactttcacaattttttatattctcacccacagtatgtgctgttatagcatttgtgcactgaaatttggtatagcttataaaaataaaaaaatggtgcaatgctcaatctatggtgcagaatgtatatgattatgaaggaataacccttctgtttgcttgaacccgacctaatactgaaacaaaacaccgccacttttgcttttaagtaaataaataaaccatacattgtggcaaaaggcatacactataaaattgaccgtcttcaccatcaagtgtacattcagtggtattaactgaattcacattgttgtacaactgtcaccaccatccatctccagaactcttttttttttttttttttcttgagacaaagtctcgctctcatcccccaggctggagtgtgatggtgtgatctcagttcactgcaacctctgcttcctgggttcaagtgatcctcctgccccagcctcccaagtagctgggattacaggaacctgccacgacgcctggctaatttctgtatttttagtagagacagggtttcaccatgttggccaggttggtctcaaactcctgacctcaggtgatctgcccacctcggcctcccaaagtgctgggattacaggtgcgagccaccacgcccaacccagaactctttttattttgcaaaattgaaattctacccattaaatagcaactcttcttttcccttctcccccaagcccttggcaactgcttttccatttctatgacaatgtctactctagatacctcatagagggtgaatcatacagtatttgtccttttatgactggcttatttcacttagctgctatattattaataccagctttctggggatataattcacaaactgcagaattgaatggtttttagtctattcacatcggatatgtttttgaagagacagtaaaaccaatccttttttccttagttctcagacacacacatgcttcttatctggcaagtcccgttataaaaatgccatgaactaaatgggaacagaagattgggggaaatatctagattattcttagtttggttcagattaattgagatagccagaatatttttgtaagcatgtttgctttaatttaaatgtcttcattttgcttcctggagccagcaatatgtgattacttattgttgttcttatggggtattgtttgcttgcgtagttgattgtgatgagttggctagaaatttaacagaatggaaatttcttcaagtctggatttgttcaaagaacagtttgaaattgaccaaagcgatagatggaactgacacttgacttatttgagatctggagttcccagtaatgaatattttggtccaagtttgaaaaatggcatttcatgtttatgtactgctgataggaatattcattggtacaaccatttagaaagacagttaggtattatccagttaacaaaaacaaatgtgtataccctgtgactcagcaattttccttctaggtgtttcctagagacttctgtactgtataccacgagacatggaggctctccagcacagctttatttgtgttaataatggtttaaaaaaataaacccaaactacttgaatgtttattaaagtgaaataaacaaattatgatatgatcaaatgacagaacacaatacaacaatgaaagtgaatgatctaaaactatataggagcaatatagatacatttcagtaacctgatatgaagccaaaaaagttacgttgcagaaaaattcaaaatatgaatgattatttttgtaaaatttcaaaagtatgcatcattaaacaagtaaagtggaatttcaccctgagacagttaaaaaaaaaaggctagaagcttagaaagacatggattagaactcgtttttctctgttctgagagtacatgtggaaatgaaagctaccagctatttctgccattttaaatgctcatatgaaatttctaagtaccctgcatagtaagtctttaaaatatcacatacacactactggcaggctaaaaaccaacagaaagatggctgggtaaaaagaaatcatgcatgcagaacactcttacttttaaaaatttacattcctgaaatagaatttttggagagaagcttttcttgaatgatgttagattgaaggatataactaaaaatagaactgcagtctttaataaatgaaaattagtcaagattctaattagtacttcctgtgttcgatactaattttgtcagttcatttctttacttaatgtgggctgtacctattcgcacatcccttgtactctttgcttgtttggttatcgttatgagaccaccaccaaccaccaccaccaccaccatggtcatcatcatcatcaccatctcctagagcacatggttttatgagccctgagctaagctccttaccgtttaatgcaaacatgttcctccctcagggtctttgcattactctaaaataacaccctcatcagtttttatccccttcaccggtttaatttttccttattgcacttacacatacttgtttgtctttctcatttcactaaaatttgagagtgatgttaagtctgtggaagcagagcccatgcttacatctgtcacttgtgtatttccagtgtttaaaactgggcctgtcacacctagaagctcactgatcataatcagtgatcatcaagtgaatgaatgcctgaattagcccaacaactctttgaggtagttattgctgttactattctacagatttttaaaaatggtggcactcagatagattaaactactcgcccacatttacccagcttgtgggtggtggaggctagaattcaaagccagtgtgcctgacaccaaagcctgttgtcttaactactccacttttctgcctatcatctgctgctagttctcagtgactttttatttatttatttttgcatagagcatcttttcttcttttcgggctatcaactcatcatttgtttaattctttgttttttgtttttgagatggaatctcgctctgtctcccaggctggagtgcagtggcacgatcttggctcactgcaacctccattgcctcccgggttcaagcctcagcctccctagtagctgggattacaggtgtgcaccaccacacccagctaatttttgtatttttagtagagacggcattctccatgttggccagggtggtcttgaactcctgacctcaggtgatccacctgccttggcctcccaaagtgttgggattacaggcatgagccgccgggcctggccttgtttaattctctgtatgcacctttttgataaatagttgtgtctccttttagggctatttctgttttgcatatacaaagactttactcatatttcaggttcagccaatttcagcctcttgcagctaacgcccttgccgtgtttagtgctattgtctgggctctgagactgaagcaggtctgtgagagcagccgacaaggtgtcaagaaggaaggatgcaataacccactgagctgcgttatctcctaaatgcatgtgtctttatgccattgctaatggcatctaatgaccttgggctccgaacaggtgctgccttgtaatctgcgctcatttgtctctttctacactgctagatttactgaaataacatgaacagggaaagcaaatgctttcatggatgccaggaatgctttatttatcttttaattttctttcatttgtttcgggatgtagaagcccactttggagttgaaataaaacaactaatgttcagagctgaggttgtcaccctttttagtaggacctcagatctagaaagggccccagagagttctcctttgcttatagaggagagtgtagtcctgtgggaccacatgtggtgctggccagcggagtaggtgggggtcctagaacttatgcagcctgactccctttctggggctccttctgaaacccagtggcatcctccttggcactttgcacacccagctgtaaatacacctgtgccatggagggctaaagccttttgggggggcatatatgggccaactgatgatcaacaacctctgttttcttagatcatctagcttctttatataacgtacctcttcgacttgggttgaccaaactcagatgatctccttaaagatgcatattaaagattgccccaatttcttaggatcctaggatatgagaatcttcatctctctctctctgtctgtgtgtgtatgtgtgtgtgagagagagagagacagagaaatttgtcctaaggaaacaaccagagatgttgaaaaaagatatatatgttcaagaagtccagcacagcatcactaaacgatagcacaatatctggagaattgaatgctagataaatagattatggttggaaattatagttatgttaaatattcacatattctgtgtgtgtgtgtgtgtgtgtgtgtgtgtgtgtgtgtgtttgagagacagagagagagagagagaatatgtatgtgaatatttaacattttgtgtttacagcctttgaagactactgcttttcctctagcatagaaataagatcaaggtttctcctactgtaaaagtttggttgaggggggttattgttttaaaatcaaaataatactaatatataatgagctcttattatggtccagatgctgtactaagtgctttacatacatgtaaaattcaattgccacagcagcccaacagcatagtgttattagccccatttgacagaacaggaagttgaggctcagagaggataagcaacttgcccaaggtggcagatcttaaagtgatagagctatgttttttttttttctttttttttttcccttagagacggagtctcattatgttgctcaggctggcctccaactcctgggctcaagcgatccttgcccctcagcctcctgtgtagctgggactatagtgcatgttgccacgcatggctatagagctatgatttgaatccaagcagtctgactccagggcatgccccagaaattgtttattgtttccctgatcacagaagggatgtatatattcatttagaaaaactggaaatacagaaaagaatgcagagcagatcacgcatacgataaatatgaacatttttagtgtctctagtcatatagattttttaactgggatcatgctgatttactgtttgtgagctagctgcctgatatttaccaggggtctgtatattgtaaacatgctgctgtgtgattttcaagcccacacagtgtgatcttagggcctatcgtaagttttacatcactcatagatactgtaatttccatccataatctatttatctagcatttaattttccagatattgtgctatcgtttagtgatgctgtgctggacttcttgaacatatatatcttttttcaacatctctggttgtttccttaggataaatttccagaactagagctggtggctcaaatagtaaggccctttataaggcttttgatatgtgttattaaattactcttcttgagcacttgccaaccatgacaaagaacgttcatgtgtctgcactctggacaacactaagtactgtaattaaaaaaaaaagaaacaaacaaaaactctgccaatttgataagttaaaaattatatcttgttttaatttgctttttttagtgtagtttcaagtgagggtggatattttccttatgtttctctgttttttacatttcttttttaaattggccattcgtgttcattgcttatttttgtcttagaaagtttttccttttactcacaattacatgtatttattttgtattaaggatattaactctttgtttaatggtattggaaatatttttcccactttgatattttcctttgaattttacttacgttgatttttatttacaaaatcaaaatatctgtgtagtcaagcatattaataattttcaaaaagtgttttgctttttttttttcccacagttgaatcctttttttttttttttttgagacggagtctcgctctgccacccaggctgcagtgcagtggcacgatcttggctcactgcaacctccgcctcccgggttcaagcgattctcctgcttcagcctccagactacaggtgtgtaccaccacgtccagctaatttcttgtatttttagtagagatggggtttcgccatgttggccaggctggtcacgaactcgtgacctcaggtgatccatctgcctcggcctcccaaagtgctgggattacaggcatgagccaccacaccctgcctgaattcttttgttttgtttgttttactttaagttctgggatacacgtgcagaacttgcaggtttgttacataggtatacatgtgccatagtggtttgctgtacctatcaacctgtcatctaggttttaagccctgcatgcattcggtatttgtcttaacactcttcctccccttgtccctccctccgacaggccccggtgtgtgatgttcccctctctgtgtccatgtgttctcaatgttaaactcccacttatgagtgagaacatgcggtgtttggttttctgttcctgggttagtttgctgagaatgatggtttccagcttcatccatgtccctgtaaaggacatgatctcattcttttttatggctgcaatttttttttaatttttttttttgcttttatacctagaaaagccttccattcactagggtcagataactatttacccacaatttattgtagttctttattatctcatagtttatatttatcgtttattttgatgtgcgatcttagacatgaggattcaatgaacttttgtcaaatattagatcagttgttctcacattatgtatttattagtcttttgccccactgagaggagacatcatctttattaagtactaataaaaactaaatgtttttagaaacatgagtatatttcttttttttttttttttgagacagagtttctctctattgcccaggcaggagtgcagcggcgtgatctcggctcactgcaagctccgcctcacgggttcaggccattctcctgcctcagcctcccgagtagctgggactgcaggcgcccgccaccacgcccggctaatttttgtgtgtgtttttagtagagacggggtttcactgtgttagccaggatggtctcgatctcctgacctcgtgatccgcatttctaagccttatattctgttatcttgatatttgttttttttctattttgcttttgattctatgagtttagaagattttaatataattagattctttcatatattttttttcagcatttattagctatttttagtctatttattctttcatgtgtacatagactaatttagtcagattttaaaacatcttttcaaaataaaatttaatttaatagattagatatcaattcagagagaatggaagtctttactgaactcttgtaatttttgatccatgcacaatgtttttcctttagttttttagtaatgcattttctgtttttatagaatctgagcagttcttgttttctttagagattttacagtgttggttataattgtgcacttaatctttattttccttatacagtagtccccccgatcaactgggggcatgttccatacccctggtggattcctgaaactgccagttagtaccaaaccctatatagattgtgttttttcctgtacgtacacaccatgataaaattcaatgtataaattagagattaacaacaataactaataatcaaataaaatacttatataaaaatatactataataaaagttatgtggatgtgatctctctcagtctccaaatatcttcttgtactgtactcgcctattttcagacagcaaattgaccaataaataaaaccatggaaagcaaaaccgtggctatggggagactactgtataagggaaattttcacctgattatcattgcgttttaggaaaactattagtatgtctatgtaagtgtgtgtggaggggtatatgtatatcttctagtaactgaccattatatataattattaatatataatatatataattttatattatacattatataatatattttatataaatatataaaatattttatatatagtatataatatattataaaatatattatatactatatataaaatatattatatatattttttgagacacagtctccttctgtcacccaggctggagtgcagtggcatgatctcagctccctgcagcctctgcctcccaggttcaagtgattcttctgtctcagcctcccaagtatctgggattacaggtgtgtaccaccacacctggctaatttttgtatttttagtagagacagggtttcaccatgttagccaggctggtctcaaacccctgacctcaggtgagccacccaccttggcctcccaaaatgctgggattacagatatgagccactgtgcctggtcaactgaccataatattgatctcagttctagagtctttcagctaattcccttagatattctaagtagacaataacatttccaataatgataattttgtctcctgtattttaatatttttaacttttatttcttctacagcatcctgatggtatgccaaataataatggaagagcagatacaaatacacttgactttattcctgaatttaatttttttttttcttgagacagagtcttgctctgtcacccaggctggagtgcagtggcgcacgatcttggctcattgcaacctctgcctcccaggctcaagtgattctccggccacagactcccaaatatctgggattacaggcatgcaacaccatgcctggctaatttttgtatttttagtagagacggagtttcaccatgttcaccaggctggtctcaaactcctgacctcaagtgatccacccgctcagcctcccaaagtgctggggttacaggcatgagccaccgcatgcagcctgaatttaatcattgactcttgtttttaacttttaatataatattggctactggtttgtggtaggtatcttttactgtggcaaatacatagtattctattctaattttcaaccctctttcccacagaatatttaagagaaaacctttttggccgctttgataatgataatttttgtctattgaatggtgatgctgtgattttcaggatgtatgtatcatggaaactggtagagaaagaaagaactgagatcatgctgaagtatactggggcccaccaagaggtagagctgagtgcaccaattgtcaccaaaatggcaacccgtaaaagagaaccattcttaagaaagagtcatgtaccatcaagcggggatttccagaagcctctgatagtaacagttctcccttccattcctttcctctctactttcaagatgcgatgatgacaaaaagactgacttgtcaaaaaaaccatgaaattccatacaaatgggcaagctgacatatagcagcttcggaaatttccacaatcgctcctctgagttgcctcaaggagaagaaaagtgagagaaaggaagggtacctttgcccccattaaggcacatgtagcatcctggaagctttgaaattacctgtccccaaagttattagaattatgtcattttttggttgttatattatgaaagcctccccacccctaaaagtttgtctataataatttttttgatcaggatttttacttcttaaattaatattaaagcattttaatgtttctagaaaatttgtcatttgtatttatattattttattttatttcattttattttatcaagacagggtcttgctctgttgcccaggctggagtgcagtggcacacgatcttggctcattgcaacctctgcctcccaggctcaagtgattctccggcctcagactcccaagtatctgggattacaggcatgcaacaccacgcctggctaatttttgtatttttagtagagacggagtttcaccatgttcgccaggctggtctcaaactcctgacctcaagtgatccacccgcttcagcctcccaaagtgctggggttacaggcatgagccaccgcatgtggcctgaatttaatcattgactcttgtttttaacttttaatataatattggctactggtttgtggtagatatcttttactgtggcaaatacatagtattctattctaattttcaaccctctttcccacagaatatttaagagaaaacctttttggccgctttgataatgataatttttgtctattgaatggtgatgctgtgattttcaggatgtatgtatcatggaaactggtagagaaagaaagaactgagatcatgctgaagtacactggggcccaccaagaggtagagctgagtgcaccaattgtcaccaaaatggcaacccataaaagagaaccattcttaagaaagagtcatgtaccatcaagcggggatttccagaagcctctgatagtaacagttctcccttccattcccttcctctctactctcaagatgcgatgatgacaaaaagactgacttgtcaaaaaaaccatgaaattccatacaaatgggcaagctgacatatagcagcttcggaaatttccacaatcgctcctctgagttgcctcaaggagaagaaaagtgagagaaaggaagggtacctttgcccccattaaggcacatgtagcatcctggaagctttgaaattacctgtccccaaagttattagaattatgtcattttttggttgttatattatgaaagcctccccacccctaaaagtttgtctataataatttttttgatcaggatttttacttcttaaattaatattaaagcattttaatgtttctagaaaatttgtcatttctatttatattattttattttatcaagacagggtcttgctctgttgcccaggctggagtgcagtggtgcagtcatagctcactgcaaccttgaacccctgggctcaagcaatcctcccgcctcagcctcccaagtagctgggactgcaggtgcatgccactatgcctggctctttttcttttttaacttttttgtagagatggggtctcactatattgctcaggctggtctcaaactcctgccttgagcaatcctgcctcagcctcccaaagcatggggattacaggtgtgagccaccggacctgaccatttctatattcaaaattttgttaacacagtcaaatattacatattttaaaaatttaaaacattctcaatatttgtgaatttattccacttcttatttttaatttggtttgttctctgaaacttaagattagctagcagtaagtcaatcttatttttgtatatattttaaaacattttgtatatattttaaaatatatgcaaaaataagatagacttactgctagctaattaatagccttttaaaataattttttttttttttttttttttttgagacggagtctcgctctgtcgcccaggccggactgcggactgcagtggcacaatctcggctcactgcaagctccgcttcccgggttcacgccattctcctgcctcagcctcccgagtggctgggactacaggcgcccgccaccgcgcccggctaattttttgtatttttagtagagacggggtttcaccttgttagccaggatggtctcgatctcctgacctcatgatccacccgcctcggcctcccaaagtgctgggattacaggcgtgagccaccgcgcccggccaaaataatttttatctcacatttggatagttttatgtgcttttcctttatattgcttttcttaggtttatttccctttctttttttttttttttaagacagagtctctctctgtcaccaggctggagtgcagtggtgcactctcggctcactgcaacctccaccttacgggttcaagtgattctcctgcctcagcctcccaagtagctgggactacaggtgcgtgccaccatgcccagctaatttttgtatttttagtacagatggagttttgccatgttggccaggatggtctcaatctcttgacctcgtgatctgcctgcccgacctcccaaagtgctgggattacaaaggtgtgagccaccgtgtcccacccccttttctaatttattgagttgatcttttatttttaatttttcttaatgataaaaatactaaagatatttgcctctgactgtaagctgcctacactttgatacataattttctcattatctttattgtctcagtctgtgattccataatttattatcttttatactctacacctatttagaagaattctttttgaatgtacaagttaatttgaattgtttacacttctgtctattaatgagttttgttgcattgtggtcacagaatattgaaaggtagtaaaatttattttatgttccaatacaggattcatttttgttaatgttccatgagcccctgtatagaagatgcatgctctaattaaatctaatcaggcttatcttgtcatcagatctgccatatttatgattttatcctacttctctatatctttattaaattttcatctgctggccgggcgcggtggctcacacctgtaatcccagcactttgggaggctgaggcaggcgcatcatgaggtcaggagatcgagaccgtcctgactaacatggtgaaaccccgtctctactaaaaatacaaaaaattagccgggtgtggtggcgggcacctgtagtcccagctactcgaaaggctgaggcaggagaatggcatgaacccaggaggcggagcttgcagtgagccgagatggagccactgcactccagaatgggcaacagagtgagactctgtctcaaaaaaaaaaaaaaaaaaaaaaaaaaaatttcatctgcttatttttccaaggactgaatgcagtggggtagactttaacattattgcatgtctctcaatctctgttttattttctttatatatttccatgctctactatcttgacacatacaattttgacttaattctttggaatgtatctcttgtcagtaaaaatttcacccctgttgaatgctttagatatgtaatactgattttgtattaacagttgtaaaactgtcacttctaaatgtgcagtttcctggtattcctttgccccaatcttcttgtaacttttatgggtttcttgcagatagtctaagggcattcttaatttatgacaccatctgagattcttttgcttttcaaaacgaattaatacctgtcttcaatgttgatacgcttattctaatttttgtcatctttttattcttttggttttatgattccttgatatttccctcattttccattttgtgtgatatgatttactgtctgtaatactcataccttatatttaatcttctagttgtcttcttaaatttgactaaatatgacctatatttctgtatgagcaaagtgaggaagctggctgaccatacctcctccctgtataagataagattaacacattttattctcctttggaattctccttttcttttttaaagttagatatagacatatagatgttttgatccagtttatgattacttttaaatattatgtaacttttcttaataaggattatctatatctgtgttcctttttataacgatattcagttgtttgttatatgctctccttatatgtgtatatatttttctctagagacagggtcttgctctgtggtgcagcctggagtgcactggtgggatcataactcgctgcagccttgacctcctggctctaaaggatcccccacctcagcctcctaagtagctgggactacaggcacacagccccacgcctggctaactttattttttttttttttttttatagatgacgtctcgatgtgttgtcccgggtggttttaaactcttggcctcaagcaatcctcccacctcggcctcccaaagttctgggattacagggatgagcccctgtgctgggcctgaatccatattgtgaactgttttaaagcacaactaccccttttctttattgtttaaaattaaatttttgattgattagggagcttcttcaaatatattctatgaaatacattgtgtttttgttgctccttgggatccaagaatgccttttttattttttaactctcataccttagtaggaaagttggttagtttggaatttttgtatcagaaccctttgccattagagctgtgtagttgttttatttcttctattgtcagaaatctgattttttttccaccttggtgacctggttacctgtatttcttttcctcctcactgaatgcttatgagttgttttgacctcaaaagttgcaccagaaggtaaataaatagatggaagttttctttaatttattaatttatattaatatttatatcagttttcatttttttcttcttgtatagagtgagtttttggttggttggttggttggttggttggtttactctgtatttcttcagtttagaaaaattttctttcattatttctttaataattgcttctgtggtatttactttgactatgcatcaatcatgctatctctatgttggcttcctactttgtctcctgtatccattagcatctatctgatttgtttatacttttcatcttttttccagtgccttttgggagactttttcaggtttgttcttcacttgctggtttgatgctccaaaggctgtttttccttttcattgcatcgaatgtagttttaaataatactttggaaaatcagtcattgaaaaaaaatcctaatttttttttgtaagttggtgtttctttttgttttcatttacttgtcattcacgcctaagtctgggtctcctccccttctttttcctcctccttcttcaaaggtgcaaatcacatcttgtctgaaacttgtttctatttccagtagtaaatattttttgaaatcgtcttcttcctttatttcttggatgtttcttgttttgttaaccaagtccttataagcccaatgttgccagttttgggtctgctcatcattgaatgatgggagggctagcccgccctggaaattgttctcaaataatctctgtaccattagggaaaggttggactcctttcctcggtcttaagctgaaggctttgttcttaaaaatgtactagaccaggtgtgtttttcagcagctgcacaaatttgtagggagctggagccacagggcaatctctattggggttcttccttgcatggttgctgcttggcaatgggtgaagccatcgtgcaagagacagtggttctcattctgaacttctccctgaccctagcttcactccaagccccctttgtagcagaggatgcatttttctggcatcagagtcctgctatgtagagagacatctcacatcccaccagatggccatgggcatggaggacttatgcttggttctcttcttagtgccttccgaatgtgaatgccctggacaccagacactatctggtttgctagcctgctctcacctccagcgttcagtccattttaggaagatttctaaccagtgctctgtcagaatctcttcttgtttcttctcacagtgctgtgccaccttttcaagaaagagaatcccaacacacatttctgattcagccttttatgtgatgctttctctggtctatctaacaaaatgtcttaatgttaaaaatgctgggtgccctccttttttttcagcactggtgtagacttccccccatctttatatttgtgggaaatggatgttcagattgatgacgtgctctaaagacagagaggggaaatttacaaaacacaaatggagaggaatgtgaattttacaaaagtatttatggagttctctaaataatgaactccctcaggacacttagcacaccaagtaatgtaaaaagttaggcttacacgtagattgtcagacacacagcttttgtatattgtaagctacacctgtatccctgtaatggtccccaggagtatcacgctgcatggtccaattaggtacagaagaactctcaagtagcagccagtcactttgcctgtaataatgtttatgattcagagtggtgcccaattcaccctttgcacttttcccagtggcatttggcagctggggcctggttattcagcagattattgcttctccccagaagcttttgtgatccttgcaggcgctctcctactagggagagaagaatgccaacatattttaaggaaacaaagaataatagtgtcacacgtctttgaataagagtgaaaaaatagttctccccacatccaaacacagtgtagtcaaaattaagaagatagaaatcaagtgtgcatgggcagagggtaggtcataggcttaatgaacccagaagagctttatttattgacttctattttatcccttctcactggtccagctgcaatgattgtcaacaaaggtgacttagaaaaagagagaccttggagagagacagaaagagagagagctggataggcagacagatgtagagcaggtttgtttgcttggcagaacatccaagtcgcagatggttctagaacagaggtaatattgccagggttgcgtggaacagatctggactaaagctgaggcttgcaggtaaagccagtggctcccactccaatgtcattcagcacatagcaatttcagctggagatctgtttatagcataaaacagacactgcagacttttttctccatgagactttaatgtttcatttactaacaagattatatatgggaagtggatgtcataagaagactgtagaatcctattgtctcaccaccgattgaggggcctttgtctatagaccaagcacgtctttttcctcggatgccttgggcatttcagaccatgcccaaaaagatatgttgtgacctgcagacctgtggttgaccatattaggatctgtgatcaatttcttagagattttgggcataaaaaatgagcaaagagccatctttaggaatttggggatatgcttgacccaaggtatttttgttttctactaacacattttgatgtaaagcaagaagtggttttcaacagttgaccatggttgcctagagagatgggtacatattcatgtattttgacctatcagatggaaacaggcttcactcttagaacttccctttggatttcccacccaccccagacactgacattccattttgaagttacacatgaatataacactgacacattgggacatgctttccaagctcaattaccatgcagcgcaatatcaattaagtggatcatgaaacatgtgtctgattgtctcacttgcataatttacattttttgacaacacttaattctcccttatatgtccaggtttcctattttgtgatgcacataattgcagaacttgggagctagaatggaccttggagaggtcccttacgccaaccctttcacttcacagatgtagaaactgaggcttagagagggtataactttcccaaggccacaaaggactagtttacagcagagctgggcttatataacagggctgcctggccggacgcggtggctcatgcctgtaatcccaacactttgggaggccaaggcgggtggatcacctgaggtcaggagttttaaactggtgaaaccccatctctactaaaaatacaaaacattagctgggcatgttggcgcatgcctgtaatcccagctacttgggaggctgaggcaggagaatcgcttgaacccgggaggcagaggttgcagtgagccaagatcgcaccattgtactccagcctgcgcaataagagcaaaagtccgtctcaaaaacaaacaaacaacacacacacacacacacacaactcatggaactgtatactttcccccaaaattcaatttagggccgggcgtgatggctcatgcttgtaatcccagcacttcgggaggctgaggcgggcggatcacgaggtcaggagatcaagaccgtcctggctaacacggcgaaaccccatctctactaaaaatacaaaaaattagccaggtttggtggcaggcgcctgtagtcccagctacttgggaggctgaggcaggagaatcacttgaacccaggagtcggaggtcacagtgagccgagatcgcaccaccggactccagcctgggcgacagagcaagactgtgtctcaaaaaataaaaataaaaaaaaaaacccacaaacaaaaaaaccacaaacaaacgaacaaacaaacaaaacagggctgcccattatcccctgcatggctccagagctattcttaagatcctctgcactttggatcttaagataacattagatttcatagtatccatgaaataacttagacctggtcttggaaatacgtttcaccatccaggtacccatcacatgtgttcgcaggtgaggctttcttagcagcactatgtaaggagacatagtaaagaaatatttattgaatactgaatattgattgagcctatgtcctgtgctaggtgttctaaatatagaaccttatctcatcccataactctttgagttaattgtcattctttttgtttgtttgtttttgagacagggtctcgctctgtctccagagtgacacactgtactccaggctggagtgcagtggcgtgattgtacctcacagcagccttgaactcctgggttcaagcgatccccccacctcatcctcctgagtatctggactatatgtacgtgccaccacacctggctaattttttaaacattatttgtaaagttagggtctcacatgtttcccaggctggtcttgaactcctgggctcaagtgatcctcccatctcagcctcccaaagtgctgggattataggcatgagacactacacctggtcagtatcgttatcttggccattttacggttaagggaatatagacccggcaagtttctatagcttgttccagaccacatagctagtaagctttgaggctcatcctagggtcactgcttgaataacctgcatttttctactgtaccatatgtattctcctgctaatcttcttactgagagagatggtagttcttctaagtatcatatgatccaaaagttgcttaaccaagagctccagcatctgaatccctgagcatacctcttcccccatgcatcatacctgtttcccattctctttgaataattttgaattgtgagcaaatgttcttacaaaataaagaagagagtgtgtccctgcagcattgtctaagtgcagaggatcttaagaatagctctggagccttgcagggctcatgggcagccctgttatataagcccagctctgctgtaaactagtcctcttgtggccttgggaaagtcataccctctttaagcctcggtgtctacatctgtgaagtgaaagcgttggcgtaagggatctcctcaaggtccattctagctcccaagttctgcaattacacgcatcacaaaatagggagcctgaacatataaaggagaatttagtgttgtcataaaatgtaacttatacaagtgagtcaatcggatacgtagttcatgatccactaaattgatactgtgctgcatagtaattgggcattagtggaagcagttcacgtaaaagactataatttgtattacttttacaccattgcaacactttttattgttcctcagtccttgatttgttttctaatgtctctagtgtgtttaacactttctcttgttatgatatgcaccatacatgtgcatgtaatataattcacatatataacatgaaaacatctgattcccacatctaacagtcagacttccgttttcctcttttccaaaatccaggtggtcagctgggtgcagtggcttgagtgtgtatttccagcactttgtgaagccaaagtgggaggattgcttagggcaggagtttgagactagcctgggcaacatagtgaggcctcatctctacattttttttttttaatcagccaggcatggtgatgtgtgcctgtggtcccggctactcagaaggctgaagtgggaggatcacctggttccaggaggctgaggctgcagtgagctctgattgtaccactgcactctagcctgggcaacaaagcaagcctgtctaaaaaaaaaaaaaaaaaagaagagaaacaaaatccagttgtctgaagaggaacaacttcttcctgagacattttctttatttcttttaattttgttttcttttttttagatacagggtctctctccatcacccaggctggagagcagtgatacaattgtggttcattgcagcctcgaactcctgggctcaagcaatggtcctaccacctcagtcagttgagtagctggaactatagatgtgcaccacgtgccacgataatttttgtttttttttttttttttgagacagagttttgctgtgttgcccaggctggtcttgaattcctgggctcaagtggtcttccctccttggccttccaaagtgctgaggttacaggtgtgtgccatgtgcctggcctgttcctctttatctctttgtattgagaggttcttgagaagcatttccatctgctttccatcgttttctcccatgtgcagacttggttaaaagaccttgaggaatcccccctttacgaagccttatccatgagaggacaagataaggagacccttggtttgtggattcagcttccatggtcattcccatcagttcccaccacttctaggagagatagtatcactcgatgctgacctggaaaatcctggtagagacccaggaactcataggactcggtccccacaccctcatgccagtacctgtgtgacggagaggcgcccctttgcatggggtgctgcacaatgccttcgtcaatcttctgccactgtcctcatccccaccccagcctgctcacctcttcccctgtaccccacagccaccaggccagtttcacctggtggaacacttcccccacttcacctgctgtgcctcacctacttcctcctgcctgttctggtgaagcctcccgcgtcttttcttgtggtaatgctcttttctgcctctctaaacttctgccagtgtttttgtatttgatttttgaaattcaactcagacctccaaatgaggcctaagtcaagcctagcttttggcgagctcaccccatttatggtgggggcctgcctggtcacctgctcgtcttaaaacctgcctttccttatggaactgtgttttcaatgaggttctggccgctaagcactcaaggctgtgtacactcaactgttgggctgttggaggtctccccatgagaactttattacagaatggagtatggagcctggaaagggaaggtggcccagtgaggaatggtactgcattctcagtctctgggtgagttgaggcaggggaccagaaggagaggagggaggagtgggaaaggcttaaagcctcttggaaggagaaaagccaggggaaaggagaatggtaactgggaaatgggctaacctcagacctgcctttagcggacgcctggctcgagggcccaagacctcaagctctcagaaactggtaagaatcatgctgtcccaggtcccagtgaggtgactctaggtaggaggcccttagcagaggtggctgggtcaatcccagtcggctgcttttatcttttattttatcggcacttagaaagaaagtatggtgctccttctgagagggctctttaacattgcaatgggccaatcactttatatcattatctcataattattatattacattacattatattatgataattcctgttttgtaaatgagtagccgaagctcagttacatagcctgtccatggtcacagtggaacatgaacccagtttgtgatgtcaaagcatttctatctttatggcaagccttcataggaagcaaaagaagcttgcaaaagtaggagacgttaccttatcctctttccccgttcagaatttgggctgcggccaggctcagtggctcacgcctgtaatctcagcactttgggaggccgaagcgggtggttcatgaggtcaagagatcaagaccattctggccaacacggtgaaaccccatctgtactaaaaatacaaaaattagcagggcatggtggcctgcgcctgtagtcccagctacttgggaggctgaggcaagagacttgcttgaacccaggaggcgaaggttgcagtgagccaagatcatgccactgcactccagcctgggtcacagagcgagactccatctaaaaaaaaaaaaaaagaattttggctgctcactgatgttagaatttaaaagaaagtaaagtgatgcttcaattaaaaaaattaaaagcttaaaaaaattaaaagctttaaagtatggattttttttggtgggcggagcaaaaacagtgactgaagtgtattcatattgaaacactgtggtgtttcactggtgttcaagttgacagggcaggggtgggaaagaattacggagtagaaacccctggggcccaatggggaggcacctagagggcctaaggggaaggatcctacagatgaacttgaccttctttatgattttgcggaagacaactctgcttatctttcctctgggaccagtaaaatagctgttgggggcagatgctttgctgatgcttagtatacaaaagacagcttatatgggggcaatattaattttcttaagtcccttggcatggattctgaaaactttaagatttatgatttgagaaccctgactctaaaatacgtgagaattttctgcttgcaaaatagattacgcttgcacaaaatacgcttgcacaaaatcttctacttgtatttctactctggattgttgaaacaaattgattttttcttttttgagacaaagtctcactctgtcatccaggctggaatgcagtggtgcaatcttggctcactgcaagctccgcctcctgggttcacgccattttcctgcctcagcctcccgagtagctgggactacaggtgcccgccaccacacccaactaatattttttgtattttttagtagagatggggtttcaccgtgttagccaggatggtctcgatctcctgacctcatggtccgcccgcctcggcctcactaagtgctgggattacaggcgtgagccactgcgcacagctgaaataaatagattttaagtggctggctggctctcagattgcatcctgttagaaagtcagaatagaaaatagatgcattttagcagtgttggaagaataaactcaaagtcccctggaaatcctggaccccacccacctcttaccaagtatccagcaggaaccttcttccttactattgttataatacattctagccccagtaatttgttccacgtatctcattagagtgaagatagcaacatacttaaataagaatttcatttttcagttttagcttttgatgtaggctaaatgctctgtgtcacataacttagactacctacatgcctcatacactgataccctattttgaaattacacatgaatttaacactgccacgttgggacgtgctttctaaagttacctatgaaataacttagatccggtcttggaaacaccttttaccagctaggtacccatcacatagcttagtaggtgatggtggggtccttcgtttttttgactacccgtataatttcaggagcaagcctaattgttatgcctcctttgttattacctcccctagcctagataacatgccttccaaattgtattgagagtacacaggaagacaactgcagcaggcaaccagctctaacaactgcgtcattttctaagaatcaaaggaattacttgagtttctagttctggctttggcttgccagacatataccttaccccagcgaggtaaatgattcaatcatttgggaatgattgaagttgctgcctaattcataacttataggtgattaaacttgtaaagtattttgaggctgtttctttcattcatttattccaaacaaacatttgttgttgaatgggtagtgactttgattttaaaacactatacagacataaaatagtggcagcttgtagatagcaattttttaatttgctgtccttaaggaatttcgttaccaaatcctcacgaatcttgaaccttagaagaataatcctttcctttgttggagttttaaatttagaataatcagacaatagtgaagcattctgttcaaagcattccttttaggctacccatttattatacgctgctcttaagaggagatgaatttgattagcattgaacattcagtcagtgtttttgcatagctaatatcacggagaaattttcaaaaaaagttatgcctgctatttaacattattatacagtcaacttttaattatctgtattaatggaatgtaatcagtgatgtgttgctccaaaatcatttcctttggctttgagaagcaccggatgatgcttttattggtttgtggttttgcttagatagtattaaaattgtgccacatgtgtgcacatagctcatcttagggaggaagtagcccaaaagtatactgggggctagggaaaggtcaactggaatttttaaacctaccacagatacatatacaatggatgaccccaagattattcatcttaattattaaataaaaaacaatggccaagaattatataatggcagctgtgtaagaaaaaagacgcaatgaaccacatgtgagatttccatgtaggacacacattgtttcccacctttcccttttgaaatttcctgaaagtgaaacactctcataacactacagcagtgaacactgttagatttagtgatcctccaaatgcattttgctggtgctccaaataggcctcttgggggaacagaaggaacagaagggctgatgtcttgacatgttaatgtttctagataatgtcacctttaggtgtgatagctgttactgtttattattttttaaataaccctcttgttcccattcattcaagttaagctttttttttttttttgagacggagtttcactctgtcaccaggctggagtgcagtggcgcgatctctgctcactgcaacctctgactccctggttcaagctgttctcctgtctcaccctcctgagtagctgggattacaggcacgtgccaccatacccagctaatttttgtatttttagtagagacaaggtttcagcatgttggccaggatggtttcgatcttctgacctcatgatccgctcgcctcagcctcccaaaatgctgggattacaggtgtgagccaccatgcccggcctaagcttgttttttttttaatgaataacaatgatagaaggaaatctttggagggtttatcttcttagtagcggcctttcaaatttcaaaagtcttctcagtgcacaaatctgtttttgcatgaggctgctatagggccagcacttttagtcctctgtggcctgttcacctgagtgagtggtgacatttcttggttcataccttggaaggcaatgatggctggccctttagagtgaggtgaaggaagactgatccctgggtgtggaggtactgatgcataggaaaagaaaacatctttggtgacaccattgggtgtcagatcagtttttggcaagttggcaggaaagtctccaaatcagtggggtctggctgggcaccagcaagttggaagctgcattagttccttctgctggcatgtccccctgtcatctggccatagcctcatctgctcctactaccttgcaggtgcccttggggtaaagctgtccagatgcacatgaacccctcctcttttcagctggacaccaagccaggaaaaggagaggtgtgactttttgacggaggccagtttctatgtcagcagccttgccagtgaacactgcaaaatggtgtcagcctgcagcctttttgtgcactggagcagagctcccctcaccacatttgtgaaacaggttctgtcatggggcccaggtgtccttttctcctgccacccccactccagcttgctggccgccttatcattccacaccaggaagccagcatccttgagttgtccttacttcttatgacctgctgtgtagaaagagaggggaaaaccagtgtccgagtggctgctgtgggtgtggtctgggccgcgtagttttatatacgtaacaaccttctgagacaagcgttagtgactccttttacagcggatgaacttgagggtcaagccagtaaataatttcctcaaagtgacagagctggaaagtggtaaagttaggatcaatactcggctttgattttaaaatatgcatatgcatatattttggagatctggatataccacttccaaagtagcatattatactgaaatttcaaaagagaaaacatctttaaacaaaaggaaataactcttaattatggagtttcaggtatcaatgtgttgctggagggctgtgatcttaaaagcatgtcacattggcaacccgttccggcaggttgtgacaagctatgtagcatgcatgaaagcatcattcattttttaaaaaatgtcttcaccatttatttctttaattttttgttttaactttttatatttataggcaataattatgtatatttatggggtacagtgtgatgtttttataatgcatacattataacaagattcaatcaagctagttaatatattcatcacctcaccagtttatcattttgtgtgtgtgtaagaacattaaaaatctgtgttagcaatttacttcattcttaatggcagactcagcttctttttttttttaaatcctagactgttggcttctccttccagcagtgttgtaggactcagctgcctttctttgctgtccctggccagagatgtgtgcactcctggtctcctaataaaactttagcctatgctgggagccatggatttggcagcactgcctttagcatttaggaatatgtttctccttacatcaagaatagttttaggccaggcatggtggctcacgcctgcaaatcccagcaccttgggaggccgaggcgggtggatcacctgaggtcgggagtttgagatcagcctaaccaacatggtgaaaccccgtctcgactgaaaatacaaaaaaatagccaagtgtggtggcatgtgcctggaagcccagctactggggaggcagaggcaggagaatcgctagaatctgagaggtagaggctgcagtgagccaagattgcgccactgcactccagcctgggtgacagagcaagactctgtctcaaaaaaaaaaaaaaaatagatttatgctgcttgttgaggaccagcagtattctcaaccatgtgaggcattcttcgaacatgtgaagcagcattttcctggatgggcatttctgccataattgtgggcagaaaaaggtgtggtccacatatgcccaacagggccaaggggcaagggtgagcatgtacctatgtcttataccccggagattcttgcggctgacgaggttcccttacaaagcccaaaggaattctcctccttccaccggaggtgtttataacctctaatttgctcaccatgcttctagtggaaggagtaggagctcaatcccctgggaggctgcggcagagccagagcaggctggtgacccagagcagtggcactcccctctgagtgcatgatgcagatggagcaggagggggatgcaggtgggacaccctgcgccctgcaggtgagtgcacagccagcgagacacccaatcagggagcaggaaggctgtccctgtggcagcaggtaaaagagagagtcgctgagatgaaattcgtgggtgtgtgcttcagcttgtttgaacagctcctgtgcaagatcttatagtaaatgctgagcttctttgtgctctgtgcctgtcggtggaaggcatagcccttgatgaagatttctccttctacccatcttgcctttggaaagggctcccctttgacaaatgctgctgtagtatttgatgcagcctccatgaggtgctttgggtgggaagtggattctgacctcatttcccagaggaatttgaagtggaggggaaggactaattggtccctcattaaggacttacaatgaagtacagtatttctcctgaaaggataatctaagtcactggataaaatgcccaacacacttttaacgtgacataggaatccaaagtcatttttaaatcaaagatttttgtagttgtggagaatggctgtgttttaatgggatctttacatatcagcattacaaagggctccttcaaatgtgatgattttaatgtttttgctggggtttcacctgaggttccaaatacatatttccctatcatatttgcaggcatccagcacccgattttagatatgcaaatcagctcactttgtttaccaggctttggataggggagaaaaggaggtctgaggctgggcacggtggccacacctgttatccagcactttgggaggccaagatgagaggattgcttgaggccaggagttcaagatcagctttggcaagatagagacctcgtctttacaaaaaataagtaaaaattagccaagcatggaggcgtgcatctgtagtcccagctcctctggaggctgaggcaggaggattgcttgagcccaggagttagaggctgcagtgagctatgatcgtgccattgcacagcctgggtgacagagctagattcagtctctgaaaaataaaaaaacaaaataacggggctgcaaaagcttccttgacgaagaaggaaagtctctcgctcctgtttaacactgcctggctgggttccagctcactagcttaaaacgagaaggcaccaccactgtgattaaaataaggccctacttaattaaaacagtgtgagaatttaataagaggcataagacttcactgatagtcaccaaaaaatctcaaaaaggtgacttaacaggcattaatagcatatgttgcttgtttactctctgtcaacattccgttttccagagacatccttcgtacaggtgaaagtctctcattcctccctctcccctcactgcctgcctttcagccatttccttgctttttgtagttaaccagtaagaaagagaccataatggagaaagaacacactgactgtgtttcacagactgttgccctcatctccacttgtgttaaagaaggtaaattagttcccctccagattaacttcagcgtcagctgtggtgctttcctgacacttcttaacatttgaacagtaccacattctgtccgttttatcgttgtctcttctcataccctgtatttgccaattctgtactcatgcccagacagatctataggtatatgtaggaggatgatgaagaacgggccgattcgtagctcaccctttgagccaggaccaaaggtttgggagtcttaggctctgaccttattcttttggagaggaaagaatcattttcctttaagcctaagtctggcaaaatctaattacaaagtttttcgattttgctattttaaaataaaagctaagccttccccccatctaatcagccctctcttcctctgcttctaatagtgaaggaaataaagaagtctctcaatttcacaagcttgaggtacttatatttgtacatgatttcctgttctaagtgggtggttttggcccctggcacttcatgtacgctagggcatttttggacacttttggtatccaccttgcttaagaattgaatgactaggaaagaaggtcatggggagtcttcaaattattaaccctcagtccaatctaagtcattagttaatgccatgtttgaaggtggtaaagtaaccgtcatcttacgaagtaactctcgtttgttatgcttagtgctgaacaaagtataaactcaccaatgtgagagacagggacaggatgcttatttctttatggatatttagaatttgagcctgtaggctgggcacggtggctcacgcctgtaatcccagcactttgggaggccgaggcaggcggatcacgaggtcaagagatccagaccgtcctggccaacatagtgaaacctcgtctcttctaaaaatacaaaaattaggtgggggtggtggtgcgcacctgtagtcccagatactcgggaggctgaggcaggagaatcacttgaacccaggaggtggaggctgtagtgagccgagatcgtgccactgcactccagcctggcgacagaatgagactccgtctcaaaaaataaataaataaaaaaaaaaaaaggaaaaaaaggaatttgagcctgtaacaccaacttcagcacaaatagatctctttcttgattctgaaatgatttatcagttttaaaaaatggtggggtgcactgctggtgggagtgtaggttgatatagtcatttgggaaagcaatttggcactattgtttaacagtgaatattcatagacccattcctaggcaataacccagggaaacttatgctgatgggtattgttcctaatggacacagcattgtttctaatagaaaaaaaaacgaagctgaaaaaattttaaaggtcgtcaacagacatatatatatatattagtctaatatatgacaattagactaatatatatattaattagactaatatatattagcttctatccctgtagactaatatatattagtctaatatataataattgaactaatatgtataatttgactaatatgtatattagcttctatctctatagacatatattagtctaatatataataattagactaatatgtataataattggactaatatatgtattagcttctatctctccagactaatatatatatatattagtctattgagaacctttatatatatatatatatatatatgcacacacacatatacacgtacatacatacatatatataattttttgcttcacagaatggaatattatacagcagtgaatatgaaggaactatagtagctacctgtaacaacatggctaaatcttagaaacaatattgtgtgaaaaaaactagtcacaaaagactatatacagtatgatagtattataaagtttaaaatcaagcacaattaaactatgtattttagagagtgatagatagaaaatttaagatagtggttacccctggagagaaggcaggaggatggcttagggaaatagcaaataggtagatggatcaaaatacccctaaatgtctagttctcaaatagggtggtcggtgtatgcctgttcattttattcttatgcttcacaggttacgtacatgttagtgcattcttttgtgggttacaaacattgcatgatagaaatatttttaaagtgatagcatgtcagaattatggcttgttttttccatctctatttcctaacattctctttccatagtccccagggagggggcttgagatcacacaggagtaattagaaggtctgcttctgacagtgtcgctccttgagtggtggaggttttagggggaggctgacagtaactactgagtggaattgagaggtgaagccagctggacttcctgggtcgagtggggacttggagaacttttctgtcttccaagggtattataaaatgcagcagtcagtgctctgtagctagcaagaggtttgtaaaatgcaccaatcagtgctctgtaaaaatgcaccagtcagtgctctgtagctagcaagagatttgtaaaatgcaccaatcagtactttgtaaaatggaccaatcagcagggttctaaaagtaaccaatcatggggaggattgagaaaagggcgttctgataggacagaaacaggacatggacgggaaaaataatggaataaaagctgccccccccaaccccccacccccacccgcaccagccaccagtgcaacctgctcagattcttttccagctgtggaagctttgttctttcactctttatgataaatcttgctgctgttcagtcttttgggtctgtgccatctttaagagctgtaacagtcaccgcaaaggttagcggctccattcttgaagtcagcgagaccacgaacccaccagaaggaaccaactccagacacagaatcagctaggagacgtgggtgctttctgtatagtgcttcctaccaaaagcctagaaaatcttggggcgtggagaaaagaaaatccatcaagtaaaggcttgatcacctcttggaaaacccatattcattgtcccaacagtgactaatacgtctaactgtgggcctgggtaggatattatgagaaacctgttcttttggtgcccacctttcttttctgagcaacacgtggtcttctgagtgaggcaggagtccggcatatgcgtgatgatgtaatatgttaggcagccaggccctcaccttttcaaaggttcgatcttgaaaaatcaaaggtggatatgtgagaaataagcccatataggaataagaatgacaatggaagtggaaaatgtaagttgggactgatgttctgctgctttgagtactgaaattctctgctgctcggattcatcatcactgaagtgctggccagtactgggaggggggcagagctctcccgggagtcgtcgcttattctgaaacagctgagcagaataatgagtgacaggctggtggtggggaggttgagtcttactccggatttccattaaatgagtgcatggaatcaatagctaactgaacatttgtctttagaacacccaggggcccctggggaatttggtattttcagtctaattctcagacaggaaaatgcgcagcatgactattttttaaaatagtttcaacatcttttatgtaatgctgatgcatctggaagtgaaaacgctaagagtttcatttcactaaaaaatggattttttttggctttaacctttaagttgaaatcacaattagtggccttttcaccatagtcataagagtatcaaagtgtgtgtattcacccacacatcaaaccagtgtttactgagagtatattctgtgcaaagaattgtgcagtttgttatgaaaaatacagagacctcgctggggcccctaaggagctcatagtctagaaagggagacagatcattacacggcagggaaaatacaatatgtatgggagcatgtcacaaaggaagtgacatcgagctgaatcttaaaggaagagcaatgcttgaatgaatgaggacatccctgattgaaggaccagcataatgaacaaagaattttgccttatattactaagattccatcagatgttatgacgcaaacataagcatcatggtaatgaaattaatagtaaatttaaataaaaatgatcaaattaagacttttttggttttgtctattctaccttctcattttaattatgttgcaaagaaccatatacttagggtaaactggtcaatagctgtggccatggaatagaattataattcaatttaaaaggagtttaatagtctcatggtaaatgaataggttacagctgggcactgtggctcacacctgtagtcccagttctttgggaggcctaggtgggaagattgctggagaccagtagtttgagtccagcctgggcgacatagcaagaccctgtctctactaaaaaattaaaaaaatagttgggcgcagtggctcacgcctgtaatcacagcactttgggagaccacatgctggtcgagaccatcctggccaacatggagaaaccccatctctactaaaaatacaaaattagctggacgtggtggtgcatgcctgtaatcccagctactcaggaggctgaggcaggataattgcttgaacctggaaggcggaggttatggtgagtggagattgcgccattgcactccagcctgggcaacaggagtgaaactatgtttcaaaaaaaaaaaaaaattaaaaaattagccaggcatggtggcgtgtgcctgtagtcccagctacccaggaggctgaggtgagaggaccacctgagcccgagaggttgaggctgaagtgagctgtcatcacaccactgcactccaacctgggaaacagagtgagaacttgtctcaaagaaaaaaaaaaaagaatgttatgaatttagtatttttatacttcccctacaactctagtatctctgaggaaaagcctcaatcagaaaaatgatttgctttggggttttatcttttatcagtgataaatgtgaattgagaatagaaatctcaaaatgcaataatgatagtactttatatttcagtaggacttaatatataaaactctaatatgcattatttaaatttggccaatatgcaagagaaaagcaacatagggcagaattatgagtttgcttcgtaaaataactattaccagttcattctgttcaactatgtactggtagcatttgtaaacaattcattcttattttttttccaaagtgcattgcaaaatagtcttgcctgtattttcctgtttgcagtctatttcattaaatttctgcaattctaaattagaatagcatctaatagaccacatatgaaatgtgcttgctattaattcagacattttatggcatattcattagtcaaatccttagtatttatttatgaagtcacattactctgtccagtaattaacagaagtggatgaatatgcatctctaattttttttttagcaaaagaaatagcttacagtaagtatttataattacgtcagctcaatgtttacagcacttgaatggcgatatgtgtagtttctgtcatttagacttcatagataatttttgtacagaaatgctttgttgttgatgctttgcttccttcacacatatatcacagattaccgaaacaatcattagtccttcagttgcaacggataagactcttctttatccttaattttctgagctcctttctaggcattttatgttcttacacagatgctaatgctaattaatgctttaatatgaaagatactggcaaataaaactgttacattttacccataagttgtaaattcagcttagttgccctaacaatactgatagtgataatggctgtacaattaatatttatggagtgcttccagtatactgagctctgtgctaaacattttacttatgtagcttagttaactctcgtaacaaccctgtgaggtaggtgttattagcccgtttcacagatgaatttgtaatcattatgccttaccacatttaataataacattctctattaatcgtatatttcagatgcccagctctggaactttgcagtatgaaacgtgtgtgtatgtgtgtgatgtatatataatatataagtatgtatatataatatataaatgtagattatataatatatatgtgtgcgtgtatatacacacatttcttttttttgttgttgttaatttatgtgccacgctgctgtacgaaactctggggtactatgatgaggggatacctctttcttgcctttaagggacttaggttgtggtgggagagatggacttggttaaggaacaagtacaggaaaatatgataattgctttaatagggataggtacaggggttgtagaaaaatgagagaaaagggcccccacttcccagaaggtgtcagggagtttttcacagagaagcgtccccagccctgagacttgaagactgagtgagtttgaaaagatgatgtgtggggggaacagaagagagaagggtgtggagatgagggaaacaagatggggtcagggagctacagggagggacttggaggtgctgagggtcaagtgcagcaggaggagagacccggctggctggggtcagagctcaaggagccttgcatgttacccaaaggaatgtagatgtcatactctgtgtgctggaaaacgatttacagatgaatccaatcaacactaattaaatcagtatgattaagggatgaccttcctttcttcctaccttcctccctcccttcctccttccctccttctttggctcatttattcactcagaagattttattgagtgcccataatgtgcaaagctttccattgaatcccaaagatgaaaggaggggtgagagtggacacagttctccctttctggagtttattgattcgtgggggaaaacaagcattaatcaatgaatcaaccaaaaaatgtaaaagttacaaaatgactactataaccagggagggtcattctatacaagtgtgtcctaggaggtggtgacctggctgaggaagtctcccttgagaagaggactgagctgagagctgaaggagaaaagaatacaaggtcatttgatagaaggggtgggtgatttgaggagaagtcttagcaaggaggaagtcatgtgcaaaggctttaaggcctgggaaagcaaggtccttttaaggaattgaaagtaagccagccatgctgtagtgcaagttggaagagaatgcaggttttgggggccatgtttagaaatggaaagccactgcaatgccttaggcaggagccaaggaaggtagtagggtggcagggtggacgcggggagacgtgttagggggccagggaaagagtccagatgagccagggtggtgccggagaggagcggagggagttgaggagtatggctgcatggttgaatatggggcataatttgggagaggaagacgtcagagtgatgttgatgccatcactgagctaggaaacgtaggtgaggcagaatctattctgcttagatttccagaaaacattaggggatagatgaggatgacatcacaatggaatttaagctatttaagctcaaggttggccttgaaaaatgagtaggaattttctttttttttttttttagacagagttccgctgttgatgcccaggctgtagtgcaatggcacgatctcagcttactgcaacctctgcctcccaggttcaagcgattctcctgcctcagcctcccgggtcactgggattacaggcgcccaccaccatgcctggctagtttttttttttagtatagatggggtttcaccatgttggccaggctggtctcgaactcctgacctcaggtgatcctcccgccttggccccccaaagtgctggatttacaggcatgagccactgtgtccagctgaaaaatgagtaggaattttctaaatggcaaggagaggcaaagcatgttaatcaaagggagtgtcatatgcaaaggcagaggcataacaaaaatagtgcaaataaatgcctacacatatacaaaaggagagttattgtgggacccatacataattttgttgatttcttgatatgctcatatccattttgtgttgcagtgattctaagatctgtattagtatgtagactttgtgaacaggtaaacatgtttaagaattttttaagacatggctgtattagatatcgaaattcctctcttcattttcatatctttactttggaattcatatatgccttttgatgttatcatctgacttgtttctaatgaaatttagccgcttaggcaggacgtggattttaggtttctgcttagtgttttggcatctggatttgggattacttagcatttttaatttactaaaataaccaccaacttacactcagttgaaatatgaacatgtcggtttcacttgagcttgggaattaaaatcaaagtacagtcaaatccaaaacaaataatagtaattttaagactaggtgacataaccctctgggaaaaatgaggtgatagtgatttgatactttttttttttttgagacagagtcttgctttgtcaccaggctggagtgcagtggcatgatctcagctcactgcaaactctgccttccggttcaagtgattctcctgcctcagcttcctgagtagctgggattacgggcacgcaccaccatgcgtggctaatttttgtatttttagtagagatggggttacaccatgttggccaggatggtctcgatctcctgacctcatgatccgcccacctcagcctcccaaagtgctgggattacaggcatgagccaccatgccccagccccgatatgttttaatactaactacagaagtgttggtagaaagatcagccttgaagagatggtatagtactagaatcctaagcatgacctctgtgaactgttggcttaagtactggctttaacatccgttggctgtatttactgtcagttttcttgtcaataatgcagaggtaaacatgattcctggccacctcacagactgcagtggagtggggcaatgtgtgtaaagcccttagcacatggcccagaacatagtaaatgtttaatcaatgttcgtgatgaccttggccatcactgacatcatgtcttaactgagttattaacaaagaggcatgtgtagtttcaaaagtgaaagtgaggccggaatggtaaatacatgcactgaatttgcataattttgtggctagaaggagtcttagagaaagagagcatcaaattcagcaatgtttctgacattttctatgaagaactgactgcttgttatttcttagaaatcttagaatcattgagcagggaaggaggggcaggaacgggattattttgatagtggtgtcctcaaggggaggagatggggtgggaagcaacccctggccagaacccactcatccctggggatagggacctgctgtgtctctgcctgctgagtttttgacattctgatttaaaaaccttgtgtgtgtgtgtgtgtgtgtgtgcgcatgcttgcgtgtgtgcatgtgtgtgtgagagattatgcaatatgatgtttcccgtttctgtgacttcagcgaatgtgaatgaagaccacagaagcagcctaactcagtgagaatattgtttttataattacaggtctaggcgttttacactgagattctccactgccaccctttctactcaagcaaaatcttcgtgaaaagatctgctgcaaggaactgatagcttatggttctccattgtgatgaaagcacatggtacaggtaaacatctccaaaagctttaaaggaaaataattatcattgagttgtaaagtccccaagatagtggtgggggtgtatacatatctggtcacacaaacatacacacacaacatacacatgtctattcatgtagactccattttttcctactgtctcttttataaaaatggaacccttgcttttttatgggaaaggaaataacttctacttattttgaggtcactagttaggatagatgacaaggcattgctgataattctgaaggcatttataaatttatagatttataaattcacttagagagacaaacatcaaatggtagtagagattgtagaagtagtagagattattaagagtattgttcctcttaacaatataattctgaacatctttcatagcaacagatatttttctaccgtatagttattaatgattagtataccattgagtaaacattctaaaatttatttaatttatatcccttctaactggacagttagccgtttctaatttttttgcctttttattttcttgagatagggtctcactctgtcacccaggctggagtgcagtggcatgattttggctcattgcagcttccacctccaaggctcaagtgatcctcccacctcagcctcccaagtattaatagctgggactacaggtgcacatcaccatgcctggctaacttttgtattttttttttttatatagtgatgaggttttgccatgttgcccaggctggtctcaaactcgtgacctcaagcagtcttcccacctcagcctcccaaagtgttgggattacaggcgtgatccaccacacccagacattttattgctttcatgatgccaaaaatattcttatagctctgtattagttcccattacaaattatttccttaggctaatttcttagcagcatactggtaaatgtaagagttttcaagttttacggcttttggtaacttgttgccaaattactttcagtaaagtcataccagtttgtatttccagaggcagtttatgagagcgtctacttaatacagttttccaatgctgagaattttgaaaacaaaaagagttttttgctgactgattatgcaaaatggtgtttccatgtattttgggttttgggggtggggggggtcatttgtaagtcaagtaaattgtactgttttgtagaaccttcctccattagacagcagcatccttgaaacttaccagatttcgacatttcagaaataatattaaatccagaaggagtagaagggtcctagggaattttaagttcttcctttctggccaagtatttttagacaactatgaaatcactagatacaatcatttttcagtggaaagcataatttttcatttcttaaaaagagcaaaaaggtatttaataaaaaaattttattagatatgtatctgaagttatactgctcattagtttaaaaatatgtatgtgcctatatatgtatgtgtgtgtgtatatatatatatgtgtatatgtgtgtgtgtgtgtgtgtgtgtgtgtgtatatatatatatatatatatgtccaatatcgggaacatgattaaatataactatgttagtgccatatgatggaaaagctgtagataagattgcaagcttcaggctgcctgggctcaaattccagctctgctgttttcttgaagtgtgacattgggcaagttactttgcatgtaaaattcggataataatagtacccttctcccttgggtgttgctgcaaataatatatatgaaatgtttaaaatcgttaaaactcctatttcaggagtatttaatcatttgagaaaatgatcaatatagaagtaaacaaatgtagggtattggcatgaaccatagtataatcctaatcttccaaaattactttgcctctctttcctccctcttttcatcctcctctagtatctacaaaaagggtttagcatacttctgaatggatttaatttgtattagtggagtaatcccagtcctggagagacttcctgattcaagttttcaagtcagagacccatttttcacagagctttgaaaccatggctgtctggatcacctggctgggggcacccttggagcagccgttgggtgagagcagagcttccttcccagccagggctgcctagctcctgtggtacagcaagtgccttgggcacagagtccctcaccgtctggcaccatatgtgagctgccctagttggctcatctcttcccgtcattactaaataagcttcatttcactaaataaatgaaagagaaggtagatgaagagacccccccgccacacccagctcttaggaaacgcatgctttatcctacagatgcatgaaggggaaggctgtaggtttgtgaatctcttgaccctttggctccatcgtaacgttgaaaagtgaaaggaaaagtggtcaaagaatcatttggcatgaaggagacaaacacagaacgacgtgtacggcttcagcctctgcctttcactggttaccctgctatgagcttgtgtatgtagacgctgcattcgttttggccctaatttctggtctaatttgaacagctctgtatttctcagcagaagaggaatatctgaattcctaattaagacatgttagcttaagaatacctccttaatgtgtcataaatcattcccctgtgactatgaggatgaataagaaaacaaaacttggatttatacacacatgtatattatttcaacaaaattaataagttcatagagggagagaggacaacaaatgtgttagcaaatataggtcaggaaaagagttcataatgttctgccagattctgatgaggcacctcatgagtgtaggtagaaggcctcaagtaacggtagtgggaatggtaataacactaccatatggaacatttggtatttgaatagcacttagcttcctcccaaactacaaaatcaataaagactcagagaggaagaaaggattctcttgctgtggatcactggctggtgtgcagaaatgcagacgtgttggttgtcaagggcttaccagaataaatttctctagggagacaggagagtgggaaatacttaaccatattaattgtgctgtgacctcagatctgtggtcagcagtttttggttgtttccatatactgcacatggttgcccacaccatttttgcattcatgtacaagacctatctgcaagaccaggcagaatcattgttgaaatcttagttcgcaaagtcccatggggactttggggtgtcttaggattttgccagcacaaagttaaagcacaacttttgaattgtgagaaactgagacaaggtctttaattttaatcccattcagtcattcctcactcatttattaatttagcaaaggcctttttaggggcagctatgtcccagtatagggctgggcattgaagataatggaggaaaacaagattgacaaaagactggccctaatggagtttacagttctcagggagatacagtcaacaccatcataactggtttgggggaacaggggagatgaactggaccattctaaaaggaggcaagaggtgcatctgaaattggaaactggagaaaccaggggagacagacctgttgatctggaaggcatagaacagaaagaaccagagaatagtcagggactgacaatgaggttgtgattgttgacagccggaccaggccaggaaatgaagaaggtaaggagagaagcgtactgtctaacacccctcgaatgcacagttgctagggccagtaaagatcatcgggctactcatctctcaatttaggtaatgtaaatgatgcatcttattgacaatccatatccttaagaaattgtgaaatgagtcttttactttttataactctacaaacatgttagaaagatggatgtcaccgtgtctttatcacagtatggtgatttttcttaaccacccaaaggaagaatcgaggtgcaccagaacacgtgtaccttgttctcttattaaccatatcctttttcttactttacccactataattcacctcagagagtgagattaattatataattaatcctaccttttgtgcacatgcataattaactttatttagttcactttaaacagattttaggttccagatctaaataatagcccctccatttgtcacatcttgacctctttactatttggtacccttccactcagcattgtttgtgggattgtggttcttcttaccttcctccctccattcctgggtgcttttagtggtctcttaaataacaggctctgctcagagatttcttttatctccttaggccttgacctgcatttggtaaaggctgcatttttagcttcggatttactgtctttgacgaacctttttctctattgtatccctccctggtcagctgctctcttcgggccctcaaacatccaccacgtactctacccagatgttttcttctttctttaacatgtccagttgagttgcccatatcatcccctactccccatccacacacccacccagcacacacacacacacacacacgcgcgcacacacacacacacacacacacacacacagtgcattctcgaacatggggtcttttccccttcaggcaccgtatgtaacccaccccgcccctcagctcttaggaaatgtttcctttatcctacagaaacacaaaaagaaaaactgtagggttgtgagtccctctcaacccttcgactacatctatatcataaggttgaaaatgaaatgaaaaaggttgaaatgtacatttctaaggttaagaaaatcctactgatattaagtatttaaaacacagacttccccaaaatttatctttcagcataaatatgcccttcccttttctcccacccttccttcaatctgtagatagcctccataattcatagccagtttgggtaaaggcattattttgagacatttaatgatttttttaggaaaagcgaaaaaatgtagggtcaaagattcaagagtatattgtgttttatatgtaggcgtagcttttaaactattttggatactttaaagttttaaaataacttaccaggcttctttatgaagcattttattctttgaaagttttataaataatatgatttctggtgtcagtatggaaacattcacatagttgtaataactctcatgaaataaggtagactattccatcatctgtgtttactcttaaaacacattagaaaatggttgatatcaaagcttacaattttgtctttcttattgctaccctaaagcagactgctgcacagaccttcccctgctacactaatgctgctttcaatgttggcaaaccatactactcaaagtgcgggcaaaactcgaggtagaaatccaactttcatacagctttatcaaaatgacagtattctatggtacttttcaaatcactatttttttctcttagaggttatcaaatgaaatgaagcatttaaatatgttttctaaattcaggaatgtgagataggagagcttttgacattataggattcagcggtggaagagaaaatgaacatccagttccctttctccctaactcaagatctgtgctccctgaatatcattagtgcttctcatttcatcagtgttcaaatagtgaatcattcattcactgattgttgaaacaactgttataagatttggaaataatatacagaacatcttggaagtactttttttttattagcaagaagcagctatatgccaaaagtattaagaaggatcatctcttcagaataagtgagaagtatatcactggtaattttttagatttttgctgaatgttttagtaaaatttgggaaggtagtttttttttgagttggcaattatatgctgtccctcttgttttctcttccaaaataatcattcttctctctctctctctctctaaaatgggagccacagagccactgtcagaattgtatacatataaacctgagaacattgcctggcctggcacatagtcaatgctcaataaacatttcttgctactgtatctactgtgttctgttccccctctgttcaacaccctgtattttttcctggtggagattttcctgagtacctaaacaaataaacatagccaaacaaaacaagaattcagtgctgatgccgtgtgctttagaagctgggtctgtgcttgacttgactgacggagatgtgatactctgagtgtgtctgcagataaagccaaattcaaaattcaagtgaaacgcccttggacttgggaatgaatcggcgggtggggggggggggctttgaccaaggtactcagtgaccctgtgcttccaagttctccatctgtaacatgagtggtttgctctcagaggtttcttccacctctaaaaattaccatcattttgcaaccttgatgctttaagactttgaagtccctgtggaaaagaacctatgaaaagcggtcactgtttctgttttccccgtgcattttagtggctgcatagagtgttttttggtgtgtgtcttccatcttgctcaggtggagctaatgacctccttctccaggatagacaataaaacaaaccaaaacaaaaacactctgttcatgcacaaaggcaaccctcttccagatgcttaaccccttaaatgagtatttcgatgacacagagggatcatcacttcacttgccactgaaatacagccatctctggagtgaaatttggcagctgggaagtagtcaagctgcagtacttatatgacagtttggggaaaaggagtgagacagaaatagcagattccaaaataatcccattaaaacagcagggaaagtggaattgggcaataagatgggaggatggtttgccccaaagtctgactgtcctgtttagacaatgcggacttcagccccagaagctctaacttgtgtcactgctggaatatagtgaccacagtcaagaatcccctacacacaccccaaaaaggggggcttatctaatgtcccattgatctatcgtcttgtgatttttttttttttctctttttcctgctactctagttatcaggctgtgctggcacataaatggatctgtctttttaaagctacctcttccttttgccccctgcataagatagtgttgtaggtaagcatgttataacatcagaaagtactcagctgagaaggagtgatgttaaagcaccctttgggctggctctggaaggatgaactgactgaccagaaaggaaaactcttctgtttaattccaggatcttgggaataacagtgacagagaaagaagattcgagaagtagatgtggttgagtacaaatgtagaactcttcagattttctggaatggggtagccattgtgataaatattaggatatgagcgtggaagtcgtagtggataaatttgaaagctactcagcaatatgtgcagcaacagtttttaaaaagcaaaaggaagatttgtcaacatagttagaaatcctcagatcctcagataatggaacatcatatctctcaaaaggaagattccagggaataaagaaagcagatgataagggaacctgggcattttagtttaaccagaaaatagaacgttaccaaaaaatttagagattaaagagtcagtttcatttagaagcacataaaatgtttatgtaatgagcagaatttatagagtctactattataaaatagaaccaaaaatgaattcaagaaaaatgtaataaaattaatgtagtgggagaaaatgaaatacaatatcagaaattctagttttgaatctcagttctgcaacttatcagctttgtgaccttagggaaatcactcaaaatctgagggttttttccgcatctctataaaatagaaataattataatatctgtctcacaggggtattgtgatgatcaaatgagataatgcattgaaaatgttttgtaaattgtagagccctctacatatgctatttctataactctgcaatttcttatggcatggagtgagctctcagagacagtaatcacatgtggaaatagcttagagaagcagtcatatcagaggcaaaatctattgtataaaaatttaaaaattcatatgaattattttttctgcttctcatttttctggctcagaaattcttctatgtttacagaatttttccaaaaatattctggtaagccctgtaacagaattgtccactctctgttaagcggtaaaccacatgattttttttccttttttttttttttttttgagacagagtcttgctctgttgcccaagctggagtgcaatggcacgatctcggctcactgcaacctctgcctcccaggttcaagcaatccttttgcctcagcttcccaagtagctgggactacaggtgtgcgccactgcacctggctaatttttgtatttttagtagagatggggtttcactatgttggctaggctggtctcgaactcctggcctcaggtgatccaccctcctcggcctcccaaagggctgggattgcaggcatgagccaccgtgcccggccaaaccacaagattttatagtaaatattgcctgtgagtaaaccttgaataacaacattaaagcagaagactgctatcttgtgtcatttgataatcctaatttagggaggtctgggcagagaaaagcggggtgtgtctgtggtctggggacaagagtaatgtaagtagcatgccacatgatgaagactgaaacggagacagtgaagcacggtaaatctttactgagtgtgggctggtgtgctgaagttccctttatgcatcagcccatctgtctcattagcttctctcttaatcacaggctccatgaagtgtctacttgtctttttttagctttttatgtcaatctcctataaaagcaaaaggaagtcaactggcctttatgctgtttgtgtatactccatgcatgctcggggtggggccagctgtatttataaatgcatgctaacatgggggttactctgtgtgcataagagcttatttgtatgtgcattcatgaatatgtgtacatttgggcagatacacaaagacacaacacatatgtgcctctgctgtatgctctcttacatggaaaagacacattgacattaattagaaaaggtgatatgaaacagtgaaagtaaaattcctttcggcagtatttactattgtaattaaagtgcatgatgtaacattatatgtgcaggagaatttgcttattcatcctttagaacaatagtaggagttacatattaacaggtttaagtgtcaataagtgtctgaatacagattctctattgtgtgcagttcttgtaataaggcagtgtattttccttgtgtctttgcttgcttggaattgaaaatgctttggatgaagaatgttgcagagtgtaatttgtggcagaaaatatgcccccactgtttgtttattattcctgaggacatttgctgggctgaactatcatatgtagaaaagaacagctttgtttggaaaatactgtaagagcagtacaagaaaattgaattaagtaaagagacttagggagtccatctttctctgatgatattccttatttgctcttcattattccctgtgaaggaataaaaacgatgaaattggatttgaagactggattaagacaaatgacttttcagatttttttttttttaccttagctgtttccaattttcctagaaaagcacatagtcactatataaagagtctgagtttattgcattaaatcttcctaaatagtgtgcccttgaggtttgatgtggggaattagtttagaagattcaggggcttggagtacctgctaactgtgtgatggcgtgtgtctctagaaattttatatgcccattgatttttatagagcaagcagtacaatagaagggaagcaggatgctgcttggtcttaaggaagtctttcctgcctaccaattgccacacccctttttctccaggtagagttgactatgttttcttctgggccattgctgtacttgcctaatacttttaataaggacttgcaaatgtgcctgtaggtctcttctaactaggctgtaaaccactcggacagaggaattgttttatttcttgtaactctaacacctaacacaaggccctcaagataacctgtcaaatgaatgaacagatgagctgaatacccgctgtgtgcctgttcttgtcttaagacatgagggacaacctgtaacacaggacacaatgtggctgtgtctgctctgaaatggtagaatatctagctacagcttagaataactgggtaaggaaataaatgctggattataacccaaagaataaaatatccaacgagtccaatgaataaataaataagggaaaaggaatgactcttccctgcagcagaatttcagttaataaacaaacgaggaaggaagcagtatgaaaacatcattagaactcatagtaagaattgccacgagaaagtcccaccgatggatgcattagatgggcagatgtggattagatggattagaatgagcgggcaaaagtatatgcagaaacaggaaattcgtagaattttaaaatatccctaccccaaacatttagtaattacaaggagaaaaataaaagtttacggtgaagaatcctggcagacatcaccttaactgagtgatcaaggttaatgtcaccagtgatacatattgacatcgtgtgtcccactgagaagggcgtgtcatctctgatatcctccctgaaaaggcataatctcactctaatcaagaaaaaaatagcaaactcaaatggaaggacattcgaaaaaataactgacccctccccttaaaattgtcaaggtctttaaggataaggaaggattcaggaactgtcacagattagcagaaactaagaaatatgaccacataaaattctaagtatgatcctgaaacaggaaaaaaaaaaaaaaagcctgtttggtgcaaaaactggtgaaatcctaatacaccctacggtttgttgagtagtcgtgacccaggttaactttctagttttgatcgtggttctatggctttgtaagctgttaatatagggggaaactgggtggaaggtacaagggagctctgtactatttttgccgctttctgtaaatctaaaattatcttcaaaaaaacctagttgacacttaggtaggccgaggtgggcagatcacttgaggtcaggagatcgagaccagactggccaacatggtgaaaccccatctctactgaaaatacaaaaattaggccgggtgcggtggctcatgcctgtaatcccaacactttgggaggccgaggcgggcggatcacctgaggtcgggagttcgagaccaccctgagcaacatggagaaaccccgtttctactaaaaatacaaataaaattagctgggcatggtggcgcatgcctgtaatcccagctactcaagaggctgaggcaggagaagcacttgaaccccggaggcagaggttgcagtgagccgagatcgcgccactgcatgccagcctgggcgacagagcgagactccgtctcaaataaataaataaataaataatacaaaaattagctaggcatggtggtgtgtacctgtaatcccagctacttgggaggctgaggcaagagaattgcttgaacctggaaggcagaggttgcagtgagctgagatccggccactgcactccagcctgggtgacagagtgagactccatcaaaaaacaaaacaaaacaaaaaatctagttcagggcacaataccaatccacaggaagcaattatagagcaatccatgacaacagacaactgagaatttgtaatggggtgccagtgtcaggttcagaagaggaatgagaaatggctggggattggagtcttcaggaagagcttcctatgagaagcaaagcctgacagggaccttaacaggatgtgtagtgatgatgggtggaggaaactgaggggtcattgtaggcacagtggcagcagggacaaaagcatgaggaagggacacagatggcctgcatgggatatgttggaggggccagcggagttatatgtgcattgctggagattggtatgaaagagaatttgacagctgtggggataacagagctaaaggatcactaagacctggcggaggaatgtgaagttaatgcaggaggtgacacagagttcccagttcttgtttatggaaggggctcagtgagtttgtgtgtatatatctgaaaccggtgacaatgtatgtagggtggccagagttgggagaaacaggggacaggcgagtcaggaattaaagataggtaatgggagcctattcgtttgagggtgttgggaggatggcaggaaaggaaaagggggcaacatattcaaaggtatttgaagggataaaataatataacttagtaattgttggatttggagaatggagaggaaggagtcaaagatgatttctgggtcatatttactggacaggtactattggtgtccataactgaaataatccattcagcagatatttgcatgcctacatcgaggaataatgtattctaggtgaggaaggaggattaaaaagaatgtcaacacagcatctgcttacgctggaatgtgggccagaaagcctgtggcttaggctagactgaatgaatggccaggtcagcctacttaaggagtccctgccctccacataaaaagaagggaaagattgccctactctgttcctagcagtagccatgaacagtgttagaagatctttcaaactgacacttctgtcctcttgataaaaatgtcaggtctactgttggaccatactcataaaaactctgttaaatcaccattctacttaggaaaaggccattcatgccccacttaactctgccaagatagaggatgctgtgttcccaaggtaccaaaactgaaagttaaaatgccataaaagtatactgaactttatagaagaaaaaacagaaaaagtgtatgcatgcttaaacctcaaactcttgatcttcaggtaccatgtcttttcaacgtagataatatcacctagtgagcacaccctgaagtcatgctctggctggctttgctgtgttctttttgttttctcttgggcttgtgtctcactctgtgttgggtaggaaagggtttctgtagcctttatacccttgttttcatcacttatttcacgaatttccacttattactcaagaataaccatatttttttatctctatgacaagctgaaaacctccctgtcagcaattatagcctgttagccctcacagagtcagtcttggggaggtatggccttgcggttcaggggcagaaccgtaggtgtattcacctgtggaagacttagacatacacatttgattatgggtggcagtaatcagatttatgttttgaaggtcttcgaagatctccgtccctttctcagtcaacattatacatcattgtttcttaacagttgagtccttataccttttttggtatcagtcggtcattaggccaagtaaacattttattgacaataggcaactgaggagaaaattaaccctttttatagttaattgtaagtggaagttgcttgatattcttaaaaatatgaaattgtggaagttctggttctagtctgagaattgagcattgagcatcacctttacaacatgtagacttaaacttcaaatacctttatgatgctgagaactccccatggaataggaaccggccatggcatatctaaaacatgacttacatagcattgcacgatataatatgaatgcatgtttttttgtagaatttagaaagaggctgaacgtgatggctcacccctgcaatcccagcactttggggggctgaggtggaaggatcacttgaagccacgagtttgagaccagcctggacagcgtagtgagaccctatctctacaaaaaaaatttaaaacttagctgagcatggtggcatgagcctgtagtcctagctacttgggaggcttatgtaggaggatcacttgagtctaggagtttgaggctgcagtgagctgtgatcgcaccactacactccagcctgggtgacagaacaagtctttgtctctttaagttttttttttttaattagctgagtgtaatgttgtgagtctgtagtcctagctgctcaggaggctgaggtgggaggattgcttgagcccaggagttcaaggttacagtgagctatgattgcaccactgcacaccagtctgggtggcaaagtgagaccctgtctctagaaaaataaaataaaagaaaataatgtataaaagaatgacatcttttgtagagcggacattggaaatggcagaatactccatgaagtagcctctagattccctttatgggcttgctgtggaagcacatatgttcacattggcagaataaagactctttttatgtccttttaaactaatgtattgacttcagtattttttttatagggaacatatttcaaaattgtaatggtagtcaatggttctatgtaaaaatactttgtctttccacagacccatatataccagccaggtcaccttcattctcagagtgcctgatgagtagagtgcattcaatacaatagctgtcttgtttttttagcagcagaagtgggagtcacatgctgaactcgggaaccattttgaatttattctcatagcaattgcaaggtaaaggcaggcagaatccttgctgtgtaaccctcaacagagctccataaggattgggaaatcaggccatgctttgtcaaagagagggtgcacacaggcatcaaacaggtcacttctcttaattcttaggccaccacacaggaagcacataattatttaatccctggatctttctagagatgcaacaaagtgatgagggtggacagctccagaaaatcgctgtgcaaggagcaagggtagaaagctagggttttggattagacagactccatttcaaattacatcttaacttagtttttattgtaccctctaacaacttatgaataaaataaggggaatatatagagagttaggcgtggggaatggttacaacttatttctcttcttcactttcatctgtctttcttcagtctcttctcccctcttccattaaaggtaaactgaataaatgaatagtgaatgaatgaagtgagcaagctgttttcaacaaagttcacttggtgccacttccatggatttagttataaaagtgatatgatcctagttatcttaggcagaatacatatttctgtgaccctaatctacgtgggtcctacttgaaacctggaaatgataggaaaaaccttcttgggaaggagaaaaatgaccaataaaaaaattctgaattatacttatagatgaagccctggtgaacccagagccctgttgactcacaaggacactcaaagtaagattagtgattcaacacattcacttcttcagtttcccaaatagattagaaggaataagagggctttcttgggttaaacttactaaccacagtgaaggaaggagaaaacctataaaaacttgaagtattataaaatctcagcggtgtgaggccatttcgtttgaggacaaacaaacctagtggattgtccagggcaggtgaatgtaaaggacatttcctgagatgcaacaaagagatgatggtacaatgggcaaggatgttgcaataacaagcaaccccaactcttcagggtggaacacagtagaagttcctttttgatggtgttacggataacttggggtgttctgcagttggagagggcgtctgtatggtggtgattccctgacccagggtccttgtatcgcaaggctcagacattccctcagtgttgggagaccctaaggatcttctgcacctggcagaagagagaagtggggaagcgagagagtgagcagtctcctgggaggtttgttggtgaaattggcatataccacttccttccatgttcccttgaccagaatttagtcatgtggacatagtcaactgcaggtaaagtggagaattgtcagcctgtatgtcaaggagtacagggaaactgttttttcaacaactaaccagtttctgccacaactggataccttcctgacgtcatctttactcccatcccagccccacccgagatttggccatgagtaccctgtaatttgcagggcattatatctctgtctcaggaacagcaggagaccactgagtcaatcggaactgttttttttttttttttttctgagacggagtctcactctgtcgcccaggctggagtgcagtggtgtgagcttggctcactacagcctccacctcctgggttcaagcgattctcctgtcttagcctccccagtagctaggattacaaggctcacaccaccatgcccagctaaattttttattttttatttttagcagagacgaggtttcaccatgttggtcaggctggtctcgaactcctgacctcaggtgatccgcccaccttggcctcccaaagtgctgggattacaggcgtgagccaccaccacgccaggccaggactcttcatcttttaaaccacccgggtctgaactgacagtcccttatgttatcttcatgggaagaagagcaggcagtcatgtgtggctccccatgaaaaggcaaggaaccttctagatactgccgctagaaaccaggtgtgggatagaagccctgcctttgatctatacctgttggtcaggaacctgcttctactttacttcattcatctgcacttcttaggagctgggtcctgttcttgtttaccattactaaattacggggaaattcctgaaattatccagtcctcccagatggttcattctttgtgtgtatacccagagcttggtcatgtccccattcctctctctcaagattagatctgctgtcaaaacctagaaacaagtctttactgaactgaactctttattagcctttgattgccagataactggacttgggaaggggagtttgggaaaaagggttaactatattaaatttttttggtgctctcttatatgggctgggatgaagcatttagacagtgggagaagtataggagaggcagacagatgccagaaaaaaaaaactttggttgtttccaggtaccgaaaaagaaagttcatttgtaagtcacccacctcctcatgatttcttcacctcctgtcccctgctcatggtactagagtttgtctatattataagctctatagctctttttgccttcctgcaaaactaagcactatttataacactgtttctctgagaaaatgtgtttggagtttcaaataaatgacttacaaatgaactttctgtatacaactcattcatacattgagaactgcctgtaccgggcatgtaacctggagataacttttatctctgctttatcaatatgggcttgtcaggttgacttatgtgtacttctctctgccttcgttttgatgatagcctctctcttaaaatttaatactctctttatgtttggagaaacattccctttggcagcgtttcaaatattcttgcgaattggaatagtgattttattttatctcccaatgtatctttaataggattcatggctatgaaaatcttttgcacagtccgcctataaattgtagaaaaattgagaactatttaaaagaagggggcgcagaaataatccttttctagtattactctgggttgtcagatatctttgcaatataattactgtgttggtttttaaaggttaaaagagctctgacgtttataattctcttttgtgtgtgtgttctacacatataaggggaaaatctaacacatggaaggaaaatactttagttaacataaaggtcctgagcattttatggtttttcaatacagagacataattcatggattttatatttgcttttacagatatctggtgaatcagttatttgctctgtggaaccaatttgcagtttacacaccttgtttatttctaagctgtgtgcatgggtaatgtgtgcacaaaaatactcttgctgacattagattgtaaagtaaaaaggcggaacactggtcctggagatatgccttctcagggaacttactatccatatacaagtaaaaatttctcattgttagcagagcagctgacagaatatgatcacaaatgttgctgatgctgttctgttaggaggtagaaatagaatgcctaggactatgcaagcttgtcagagttagattgtcagggtgatgtgcttccatattaaaaagaatactttgttcccccctcacacatgcacccttgcagtggaaagaaacatttatttcagaataagcgcaagttattctgacttgcactcacaggctcagactttgatgccagtgtagttaaaatttagtgaataccagtcatgtttaatggtctttcccttctgtttaaaacagtactgcagcccatgcaagaaacatttccctttaattttatgcattttgtggtatcttttgatggtttttctctactgtcaaaactgtgagaataatttcaatggcatgttttttctgccatcttcagttggcagtcatatccccccagattgtcctcatagattccagatcacctttatgtttaatcttcattaattgacaagtacctttgaaagggttttgcaaaaattgaactgcaaagctgtgatttaatacaaggaaggctacatcagtgtgaaagaaagcactttatgaactgtagagtactatttaaaggtgaggcattataattaaatatgctcaggttgttactgagcattgaatgccaaagcatatgaaagacaacttacgatgccaggagtttgagactagcctaggcaacacagtgaggacccacctctacaaaatgtttttgttgttgttgttgttgttgttgtttttgagacggagtctcactctgttgcccaggctggagtgcagtggtgtgatctcggctcactgcaacctttgcctcccagattcaagcgattctcctgcctcagcctcccgagtagctgagattacaggaacccaccaccatgcccggctaatttttttttgtatttttagtagagacggggtttcacagtgttcgccaggatggtcttgatctcctgacctcgtgatccgcccgccgtggcctcccaaagtgctgggattacagtcgtgagccaccgcgcccagcctgtttgtttgtttgtttgtttgttttttaattggccaggcatggtgagatgtgcttatagtccagctactctggaggctgaggcgggaggatcgcttgagcccaggagtttgagattacagcaatgttatgagagtagctagaagttacaccaatgctgcaggagtttgggggaatccagagttgtaaaatgccaacaaaaattattaattaaggggatctcttagccgtctctttgaccctacaaaaaacatggtggtactgagttttttagcctcacccaagcaaaaacagaatagggcattgtatttcttatatctggatgcaaaaacatgaaatgttaattgtagattataagtcattaagtgtcacggatttatgttttatgacaagttggagtttacagatttctaggctatttttttcacatagagatacatgaaagctttattcttgttattcaacgtaaatcttttataatctgctctcaatttccagtatcctgaaaaatcctttttctctcttttttgagacccttccctccccctaccatccagagtcatgcagttaacagttctgatagtgcttggattcatttgtagattgtacataccaaatggagctggcacctcttcatggaaattggacccagtgggctattttacacttgccggatgtgctttcctcagtagaagtttatattttatagctgatactccattgaccatagtaacctgttataaaacatgatgttttatcatttgttctgtgtcttcagggctgaacattttatggagagactttattaacatttaaagagactttattaaccctagatattaacatggtttacctggaaattttttgagcaatgttttcatttgattcctggaatgttcaaatagcaaaggcagtttctgttggtgtgcatgtgtgtgtttgtggttaaaagccagcattacccagagaccttctggttcatgtggaaattattattattactatgattattgttatttttgcaaatgaataaattgtcattctgatttttttaacctcaacgttcctttaaaaacactgttgatttttatggagaaggttgatttcctggaagtaataatatgatgttagagattactttttaggcaatattttggcatgtttatcagataaatcaaacatcaaataaatagattatggggaatgatttttcagtaatctctttttgcagtttcttccctaaacaaaatgatgtggcctattaggtggattggtttggaggacaattgcttacagggaccctgtccttatggtgtggagaagcagaaaaaactcacagtactccagagtagcccccttattctttttcataaacttcaaactaggtatgaaagacctgtccactttaaagctttcgcctgtgaagataaagcagagattgatttttaaccactatgctcatatggggaaacagaatgcaggagctaagatttaaagaagcagatgggaagaagagaaataacctcctctggcatccacctggaaatgtctcctgagaaagaggatggacatcttctgatattcataagtcaaggaactgcttgaattctgtattccgtgtacagtattctacctatcaagaccctcacccagggaagaaagtcttgtttattcaggagatggggagcaggaggcattgaggactgcatagcttatttaaattaaaaaaaaaagtgcaatgaattgctttttagtgtatttacagagctgtgcagctatcaccacaataaattttagaacattttcatcacccctaaaggaaatcccatacccatcagcaatcacttcccattttcccccaatcctctaccctcagctcctggcaaccacgaagctgtttctctatatatagatttgcttgttctagacattccatataaatagaatcatgcaatatgcggacttctgtgactgacttctttcacttagcataatgctttcaaggatcatccacatttcagcatacatcagtcattcatttcttgttatgatggaataatgtaacattgtatggctataccttattttgtttattcatttatcagttgatggacatttgggttgtctccactctttcactattatgaacagtgctgctatgaacattcctttccaagtttttgtgtagacatagtttcatttctctgtgcagcctacttttaggtagttacaaattaagattgtaagtgatttttttttcattttacacatttgttcgcttcacgatggcctcctctctcttcttacctatctcactctcccaaaaatgatttttcttgagaacatagttgtagaagggtaagaatatcaaccaacttttgctaagtatgaatgcccaggcgctctgctaagcatcatgtatgtgttacaatgtttctcactttatagacgggggctgaggtttagagaggctgctaagcctggaggtcattcagctgaaaaggtagaagagctgggatttggacccacatcctgtttactcagcaaggtccatgctgtctgttgactccctcatgatatgatcccagatcatacacctgttgaaatcttagagaattctctttctattcgtgagcttctcccaattgtatcctaaaaagtaaggaatataaatcagatgctccgtcctaagcccttggacctggagcgggcatttgtgttccccgttgacaaaaagatgatgaaatacttcctctgtgtctgagtgcagcggcgtcatggaccggtgttaagtttaacctgacccttctctctgccctgcagttgcttcatctcctcaccttaagacttcacctttccttcatttcagcttcccagagatactgccacaccccggacctgtgtatcaacttgaaccctcacaccccccaacttggacctttctaaatcttaaaatctcagactctgtagttctctctgggcatagcctcctgacccccttgctttccctctcttcctcagaactcagttgtctccttattgtgagccctgactcatcccccactcttggtcactatagccactttcttcaggctccgtattcctgccccctaaccagcctagacctcatggcttgaaagtttaactgtgcatgcccaatagcttagtgccatgcattcctttccaggcaccaatcctgcatgatccccatcacctgcacagctgcttagaggcccccaaacccaactgatgggtcctgatgtaaattcttactgttaatctgaggagagtcatcattgcttttctagtgggctcatagtcacatttcttatgggatctattccaaacttttccagtctcttcaaaacttaccctcaccctcactttggtagaggaccatttattcatcttgcttttttaaaatcttgaagaatccaggcatgaatccttctactctctttttccctttaattctgtccgttgctcctgtctcacagttgcagacaagtgttgcatgctgtgctcacgcatcccagaggagcaagaagacctcccactccgcaaggctccaagacccctcgttttctggatccctctctaccctgacttctctgaggctttgtcacctaggttatctccctctcctgcttgatctttcattatcttcatcttaaccaaaaccttctcttcagtctatgaatgtgcctagtggtgtggcctgtcttttaaaaactaaaggagcccttattttgaccttgttctcctcaggcaatttccatttctctattctttctttaacctcaacatgttttgaaaacatagtctgtgttctattcatccagattattaccacccactgaagtcttagtcaccagttcttctctgtcatccaagcactggaaacttctcggcccaatgtcttcactggcctaagatggactcaaactagtaagcttttattcagtggttactcctagacctctgggctgtatttcctacggtggctgctgccagccatttcatttcttttcttttctttttcttttgtttcttttcttttctttttcctttcctttcctttcctttcctctcctctcctctcctctcctctcctctccttttctttcttttcttttcttctccttccccttccccattccccttctttcttctttcttcttcttctttttttttttttttgagacaagatctagctctgttgcccaggctggagtacagtggggtgatcttggctcactgcaacctctgcctcccgggctcaagtgatcttcccatctcagcctcccaaatagctgggactacaggtgcaggccaccacacctggctaatttttgtattttttgtagaggcagggttttgctgtgttgcccaggctggtctccaactctgagctcaagcaatccgcctgcctcggcctcccaaagtgctgggattacaggtgtgagccactgcatcagcctatttgtttctgaaaacactctttatctgcctttattttctcttaccctctactgctctgatcatttcttctttatgtcttccttcttttgtcccttttcgtacttattcttaaaagtagattctgcctaagtgtgtataaccacttttcttccttgtttacatcttccaggtcctgagggagtgttgtgacttggttacagcctaccttcctaaccttactcattgcagcccaggcttccccataattatatacatgttcctctcacacctcaagctcccttggttttctgcttctgttgcatctctggtttctttcacctaggatcatcctcctgcctcccctctctgcatttctatatattcttttccaggaccacatcaaattctgtgttctccttatgacataatctcaaatgaccccaggaagttatcttttttttggtccacatttttaatgggacctttcttacttttacttggttttcaaattatttgttgaaacacatttcttttaaactatgtactcatgagacagtatattgagaatttaacccctgtccttaaacacagtaaatattgtgtcaatgtttgctaaatgaaaggagtgaaaagtatggctctatgggaacttgttggtgaatgtcccatttttatttaccaatgaagaaaagcaaaacttagcaaaatgtatctgtggagaggtgggtgggagagggttgttgtatagtctgaaccaaaataattaactcctgtaattgcaaaaatattatcattgctcagtgcaccattttgcagttaatcagatagttttagggaaatattaaatgattctcaagcttggaaaatagcaatgagtgttatggcatcactatacagcccagaatgaactcatggatcctccaatctcttgtatcagatatactgcatactggatacccaaggcatcagggattcagagaaatttttccgaaggtcatctgggtaggaagcctgacttttatagaatatttcataaaattctttttattttatttttcaatagtttctctacattgtatacaaagcacactaattactcactcccattgtctccactaattacatcactcccattttgttctcctatgaacaaagaagaaaggaacaagaggttgttttttcattttgaagaggcaaggttgatatgtttgactaaaataaagttgggattacctgtgaatttcagccagctttgccctccggtccatcaggtggacagtggaaaattgactgtgatgctaaaaatggtcataattgggggaaagtaagctttaccacctcttttgtgatgctgaatgtgtcttcaagggaatcaaaaaagttgtgcttgacaggcaaggtgaaaaacccagggatttgctacaagaatctctgcaggagtggtagaatgagaagcttcattggagtctgggacattttagtgttgctggcccattaccctgaacactcttctaacctcctccaagacgggtgtctgagaggagctgggccctgcagaccaattctagtcttctctctccacccctgccccctttagaacaagcatattaaaggaatgtctgatgagctcactatagtctttgtcaggacattttattttttatttttttatttttatttttgaggtggagtttcgctcttgctatccaaactggagtgcaatggtgtgatctcggtgcactgcaacctccgcctccccgtttaaacgattctcctgcctcagcctcccgagtagctgggattacaagcacctgccaccatgcccagcaaatttttgtatttttagtagagacggggtttcaccatgttggccaggctggtctccagctcctgtcaggacatttttacagctgttttcgttctaaccctaactgatgaccattggaagacctaaaaattcagctacgcagaataagtaaaattggtctttttctttgcatcctgaggataaatctaaacaaacccctctcgttggcatatctccagctacaacagagggcaaatttgaatggattatgaagattgaattatccacttggtcttggaggtggtcccgtctcctgtgatggtggggtggggaggcggtgcagacatgtgtacaggaagcttagccaaatgcctctatttgggaaaagttgaaatcagtttcctgggcagtcaattttgagggtttaaaaaactttattttttttttattaaacatactaaaaataacaaagctatccaaaattagaccacgtactttgctccttttatatttcagtgtccttggtatgcttggtttcttttctttctttttgaagcattaatattgttttgaattgctagatatacagaaggtacgatagatgtacaaggaaaaataagcatctctcttatttctgtgtctaagtcacttgaattctcacctagaagcaagtaccattatcattttcttgtgagtccttttaaggatattttatgattatataagcaaaaatataggttttttaaaacaatgtttacaccccatacactattctgccctttacctcttttcacctaacagtgtgtcctggaaaacctttcttatcggaacatagaacagccttattcttttttagtatctaaatagtattcgattgtatgattttgccataaagtattcagtcccacattgatggactttttttttttttttggttgtttccagtcacttgctactatgaacaatgcttcagtgaacaactctctataaatagcatgttgtatgtcagcaaggatctctggaggagaaattactaaaggggaattgttggatcaaaaggaatatgcagttttaattttggtaaaccttgccaaattgccctccaatttggcattcgtcctattgtatgttcctgctagcactgtttgagtgtgcttttctccacagacgatgtttttaaacttcacgatctttgccaatctgagaggtgaaaactactatattctagtagctttaatatgggtttctgttattatagtggtggttgaatatactttcatatgtttaaaagccgttcctattttcttttctgggaaatgtatattcatcctcgttgcccatttttctactacgtttttggtttatcctgtgaattgacttttttttttaggagcatgtaacagctaaaaagattagtccttttgtcttatgctattttagtttaaatttttccgtttgtcttttgactttatgttttcttcatgcagggttttaaaaaattaaagtcatcttatttatcagatttttattttttggcttttaatttttttacatacttaggtctcttctacgcagtaattataatttttaaattgtctcgtattttttattagtattttaaaaataatagttttggccaggcacaatggttcatgcctgtaatcccagcactttgggaggccaaggcgagagcatcacttgaggccaggagttagagaccagtctggacaacacagggagaccctgtttttacataataataataataaatagccaaacatggtggcgcacgcctgtttgtactcgggaggctgaggtggaaggattgtttgagcccaggagtttgagactgcagtgagttatggtcgtgctactacactccagcctgggtgacagagtgagaccctgtctctaaaagaaaataaaaattaaaaaggttttattgagatatgattcatatatcgtaaaacttaccttttttttttcttttttttttttttttttgacacaggatctcgctctgtcacccaggctggagtgcagtggtgcagtcacagcttactgcaacctggaactcctgggctcaagcagcctcctgccttagccttctaaagtgctaggattacaggtgtgagccactgtgcccagccacaatgcagtcttttaataaatgggtttttaatctattcatagaattatacaatcatcatcaaaacctaattttacattttcattactccaaaaagaaaacctttacccattaagcacccactcccccatttcctctaccttctggcccctggtatccacttaatctatgttttatctctatggatttgcctgtcctagacatctcatataaatggaaccatataatgtgtggccttacacaactgacttttccacttagcgtaatgttttcaaggttctttctcatatttttatgctttcattttttacgttcaaatctttggtcaccttgggatttattttagtgcaggatgtgaattagggatctatatttttttaggtggccgtccaattattggaagtccttcctcccactaaagtgcagtgacacccatatcattcactgaagtccagtattcatttggatcgacctcttttctgttgaccttgctaagtattcctgtgcccatgcacactgttttactttctaaggctttataatatttttaatatcggtatggtattcttttcttatttctttttatatcattgttatggccattctttcctgtttatttttccataggaacttcagaattagctttctaatttgtatttttgacatcatataagtttatagataaatatagaaagaattattctcttgatattgactttctattcaagaagaagatagacctttgcagttgttcctatctcctcctctgtccctcagtagtatttaacattcttctttatgtagatttgttttttttttttttttttttgaaatggggtttcactctgtttcccaggctaaagtgcagtggcacaatcttggctcactgaaacctctggctcccaggttcaagcgattcttgtgccttagcctccccagtaactgggactacaggtgtctgccaccacacctggctaatttttttgtatttttagtagagacggcgttttaccatgtttggttaggctggtctcgaactcctgacctcaagtgatctgcccacctcgccctcccaaagtgctggaataataggcctgagccactgcacccagccctctttatgtagatcttgcatatagtcctccttcagtttatccctaggcattttatatttttgttgttatttaaatatgggatacctttttactggttgtcctttagaaaggttattgatttttgtatattcttttgtttcagttaccctacagaattctctaattaataagttgttcaattgacttgctcagatcatagcatttataaataataatttttctgcctgttataatttttatatcccttatttatttctcttatgcagttaaattggctaagtttaacagatcagtgttaaataacagagatgatggtagacatcctcatgttgttcctatttttaatgggatgcttctcatgttcccccattaacagtgagcctgcctttggggtggagcctgtttattgtccatttggcgtttgtagggcttttataatgagtagaaaacgttttggaaatgctgaatctgacggaattatttgcagaaaggtaaagtatgctgtgttagttctcccgcagtgataaaatagtagtctgatttttcttaccagcattgacaggagtttatgagtgggaagtctgtgctataaaggaagaaggcagcaattgtattttaatctcatgctatttttcttttgccaacgaagtaaaaagactaagaagctataggaatatgtagtaaaggcttttgctaagagagaaaaggaagaaaggtggaagaatgggatggaagaaacgagataaaagtatacctcattttcctcagcgtccccccagatcaagtcacctgataaaccaaatattactagggtagtttttttccccaaaatattattaccaaaaaatgacacaaaacactaattgtcaaccaaaatgataaagagtctccgaaaaggcttgcaagaaaatagtgaaatattttatcatttgtaagcaaaagataataatacagagttccaaatactgagaaaccacaagaggaaaaagaatgcctattgaaacatgtttatatgttgattctttttgatggtgccattaaagaaaaaagaatgttttgatctcttgcaaagaaagccaaactagagaggtattttatgagctaaccccaaacctgacattactctagtaataaataccaggacaggctgtcccttgcattagcagaactggaaaacaaaacaaaagacagtaacaattgaggctttgatgcttgttggaaacatctaacatacagagttagtgtgttgtggtcataaacaaaaggagtttaggctgactccataaattagggaaactgatgcgtcctgttgcttgggacacactacacaattatctgcatgacaggcaggaaagaaagcactggaaggcaaacagactgcagaacaatgtggccacccagttggttttagacacacacacccctggcctgcagaggtgtctatttgacagccggtctcatgtcaaaactttcttttatgtgattttccgattgtaggaaccactgggctctgggtgggtgtcttaggcgagtctgccttagtgttgagtttgacatatggtagcattgttaggtggtgtgtttaggagaagccaaccagggcctcagagccaaaagcatggagctcactggctgtgtgaacttgaccaagctactgaacttttctgagcctagtttgtcatctgcaagtaatgcctacagttcacggcttttgtatgtacttatgagatgttgtacatctagcacctcacatggggcttgtagagagcagttgctcaggcagtgtttgtaagtggagcacaggaagcaagggatggaaagagtatcacatcaggaccaaggatgaaggagtgtttgtaggaaagacctccgagatgatggttgagatggattatgtacaataaacaggaagcatgttcttgggaagtgcttctaagcatagaagggcagcattttcaaaggcatgggtgtggaggaatctttgaaacccagggaactgtagtagagcatggctcagtcccagggtatgagatggggagtttcactcattgagacaggacagatgagccagcgtgggattgagtggggactcgtgtatcctgttcagactatagtcacgatgatggagagtcgttaaaggctgtagacatggccaggcatagtggctcatgcttgtaatctcagcactttgggaggctgaggcgggtgcatcacctgaggtcaggagttcgagaccagcctagccaacatggtgaaaccctatctctactaaaaatacaaaaaaattagccgggcgtggtggcatgtgcctgtaatcccagcactttgggacgctgaggtgggtgcatcacctgaggtcaggagttcgagactagcctggccaacatggtgaaaccccatctctactaaaaatacaaaaaaattagccgggcgtggtggcgggcgcctgtaatctcagctactcaggaggctgaggcaggagaattgcttgaatctgggagctggaggttgcagtgagccaagaccgcaccattgcactccagcctgggcgacaagaaccaaactccatctcaaaaaataaaaaagctgtagacatgagggacagcatttcatttgcattttggaaatgtgacagtaatgtctctcgggtgggtttagagattggggaggaaatgagctctggcccagggtaatgatttcttccatattttccacaaatcttagcacagggctaaacgcatagtagatttttagggaaaacctcttgatggccttgaacaaaagttattgttttgccaggatcatcttttccatgaatcacttgttataccattagtagattattcttgtgtggagttgatcattttagcccccaaattatttttgtccctcgattacatcatcttaaacgattgtgtgttgtggcatagacatatcctaatctacttacaatttatggtgcaagtatctgtgtcataaaagatatcttcttctttaaaatatgctagcctagcactccatgaaaatggagactcacagtgctgccctgtccttcaaagatgtttatgtacaaagggataactgttcccacccctaaatgctttaggctttgcctatactgcctttcaaagctttccctattttaagattttttgaggccccttggatctctggaaggagaaagctataatagcttttggtttctgattgtctttaagcagagaaaactcacagtctcatttaggggcgtgacacattcctagtagggatggtcagtcccaggcaatagctgtggccatgggctgttgagggccatggtgagggcccatgcggtaacagacagtggtatgcatgctggactggggtgagtaaatagccattattcagaaccacggattctattttcaatcagtctgtcaactgatatttttgagagtctgccatgtaccaagcagagtgctaagttctgaagatactaaggtagacaagataaaaatggcccctacccacatggcactacattatagttattataggagagtggatagaacatatctagtcaattaccgtgcactgagaaaggtactgtgagacggaaatacaaagtatggtggaagcatcctggagtgacaactgaccctcacttggaaggccatgcaggacttccatgagggtcaagagtttcctgaacccggacaggagcaagatctaccttagagaggtttggggtgaaataacgccatgaaagggatagtctttaatctagaaggaaaaatggagtattacacatttgtaataagtgttcgagatagcctttgagtcatacagtatttggaatgtatgcttggctgtcagtgatcttataagacccaaaccacagttttctttatgctgtgtcctggcgctgccaatggccagctggaagggccatggcagggtagccacgtagagaggccacctcctagaggcgcatagcctgaacgaaagcggaatttgaacaacacctccgaaaagattggaaagtcatggtatctgtgcgattgcccacaaggaggtctcctgaagtcgaagccctttggttctctggcgttttaatgatttgctattctgtcatcggaaatacgtggagcagccacatccttagacagaagaggcccagccacgttgctctggagtagaatttagtatgagtgtgagtggaagttaaacagatgtggaagcgcagagtgcagctgaacatcattgacatggaccagcaggtaaacagacttcaaggtgatacacccccgtaaggcaatgttctggccagctccgccagtcaaggctgtacagcggatagtaattatttctgtcacagcgaagatagatgctggatgtgggcagatgggggtagacttgtgaaaagtgtgagtatctttgagtatcttttataaatttagtgagtggagtggcaacccacctacacttctaatttttgctgttggaagctatgtccagaaaagagaagagaaatttctctacctgataaattacaccttattcaaaacacactgtgtgaatgaaggtgctgcttcgtcttctctctgctaacgtaacgttgtgcacaatattttttcttttgaagcagcagaaggacattttaatagaaaaatacctttactcctgttaaaggagtatcttggagttcttcacctgtctttatgggggacactccccactacatggcttcataaggatttagggatgacttgctcattagacatagagtgagctggttagaaagacaagtgtgagttggggtacagtggcatagaatgtttaaaatattgagcaatttaggatccttattctggactttaattgtttctagagccagcctctccacgtgtgagtagcatctttgagtggcaagaaaaccattctgggttgtcattgagagcatgtgtccttggagagtgccttagcagtacctcctgtgtcctcccacgacacatatccacctatgcacacgtccaccatcctatacgcacacaggtgcatcttgcagtttcacagcccgagcacagccagagagaaatgactaacatagacttgatttttcgatttaaagacgctcctctttttgctcttcctcttgaatatgacttttcttttccttattttcagtgttttcaagggaaatgtcaaattttcagacccgtaacttctgctagaatcacagaccattagggactgtagagatctaacatgcccagctggaagcgccacagcaggatagctgtgtagagacgtgcagcaggcattcagaaaaacagatctgcatcttggaaagagaggtcagggctcgacttgtggatttcagagtcactcacttagaagcagtagacatagtacacatctaatgaaagcattcccctgctcggaaatcttcagaagtccctcagattttacagaatcaactcaaattactcagcaagacctttgacaccctccaccatgtaacctcttctttcctcctctcccacttctgtctccccacacacatacacctccaaccgcaatggtctcttgaacatattagcacacgtttcttcccactttttctcaagctgttttatttctttagcattagctcagattccacttccttctggaatctttctttcatgaattcagatcgtgaaagaccaaagggaatgttggggcctgtcatgaattagaaaatatattctctgttttcaccaatcacaagtcttgtatgacttgcctagaatagcttcctttatgtgttctaagggatatgggagcccgtctagactggcctccttcacagcgctgggatccgttctgcaaacccatcacagaaatacatgtggcttcttcctgcagtaaaatatgtaggaacttatccaagatttttctttttattcttcatttatgttattttatctccagtgttatgtctccaaggatgttaggttgaattatcccctctgaaaagccatactagtttttgaattaggatgcagtgattctaacttcaggtccactgtcaactcattagtttatttaggcaagttgcataacctctgccttaatttatcatctgtaaaatggggctaggagtaactcatgatttttataaggaaaaataagacctgaagttaaaacattttggaaaatgttttcaaatatggaatacaaacatgaggtgatattattgctaccatattgcttatagtcaagaaaaaaacttaatcctttttgataatctaatacagactgtgtcatactatatgttgcaaaaaatgtatagaacttgacattcgaagagatgagtattttggctctgtggtttattagctgtgtgtccatggctgacttacctaacctttttgagcttcagtttcttttctataaattgggaataattatgttactatttattagggttgttaagtaattatattctgcaactattatgcatgaaaggcacttttaaaactacagaagagcatagtcaacagtaaccatcatggtctcacttatggcctaataattatgcctactgtagaaatagatcaaaatgtatttggattcccttttctaggataccctctcagattgtcccaaatatacaagggatgaaagaagaaggaacaagtgtgggctgaatatgcagaagaggatggaaagttgacaggagcatgtggttggaagaggccatgttgacatgcagattgtgtgatagccacattgccagagctgagagggtgcaggagggaaggcaagagggaagccttggtatccatgtaaaaccagtgaccacttgctagggtgtgtccataagcattgcatgcctattctttttttttttttttttttgtattttatttatttattttactttaagttctggggtacatatgtagaacatgcaggtctgttgcataggtatacatgtgttctggtggtttgctgcacctattaacctgtcatctaggttccctcccctccccaccccagtccccaacagaccccggtgtgtgttgttccccttcctgtgtccatgtgttctcatttttcaactcccacttatgagtgagaatggcatgcctattcctttttttttttttttttttttgagacagagtttcgctcttgttgcccaggctggagtgcaatggtgcgatctcggctcaccacaatctttgctcctgagttcaagttattctactgcctgagcctcctgagtagctgggattacgggcatgcacctccatgccctgctaattttgcatttttagtagagacggggtttcaccatgttggtcaggctggtctcgaactcccagcctcaggtgatccgcccatctctgcctcccaaagtgctgggattacaggcgtaagccgctgcacctggccagcatgcctattcttgaatgtgccctttaagcagtagtggacaacctggggcatcggtggtatcctctgtgggacaacagacacctatatgggagctggttccgcttccctcacttatggctttttacagccatgtgccgcataacgacatttgggtcaacagtgggtcacatatatcatgatagtcccataagattataatgaagctgaagaatttttatcgcctagtaatgttgtagccattgtaatgtcctagtgcaactcattactcatatgtttgctgtgatgctgcaaccctactgtgctgccagtcatgtaagagtagagcacatgcaattcggtacagcacataatgcttgataatggtaataaacaactgttattggtttatgcacttactatactatacttttgatcattgttttagactgtatttcttctacttatttaaaaaaaaaaaagttaactgcaaaccaacttcaggcaggtccttccatagatgtgtaagaagaaggcactgttgtcataggagatgacaggtccatgtgtgttattgccctgaagacctctcagtgggacaagatgtggaggtagaggtgatatgaatgatcctgaccctgtataggcctagactaatgcgtgtttgtttcttagtattttattttgtttgctatttatgtatttatttatttattgagacagccttactttgtcgcccaggctggagtgcagtggtgcaatctctgctcactgcaacctctgcctcctgggttcaagccattctcctgcctcagcctcctgagtagctgggattacaggcatgcaccaccacgccggctaatttttgtatttttagcagagacggagttttactctgttggtcaggctggtctcaaactcctggcctcaagcaatccacccgcctcggcctcccaaagtgctgggattacaggtgtgcaccactgctcctgccttagtattgttttaaaaaaaaaagtttaaaattttttaaaaatgaaaatagaaaaatgtttattgaataaagatataaaagaagaaaatattttcgtacaactttaaagtggatgatgttttaagctaagtattattacaagagtcgaaaagttttaaataatgtgtttataaagtaaaaaagttacagtaagctaagtttaatttattattgaagaaagaaatttcaaaaataaatttggtgcagcctaagtgtatacagtgtttataaagtctgcagtagtgtacagtaatgtcctaggccttcacattcgctcaccacccactcactgactcacccagagcaacttccaatcctgcaagctccattcatgggaagtgccctatacaggtgtaccatattttatcttttctgcttcattttgactgtatcttttctatatttaggtatgtttgaatgcacaaatacttaccattgtaatacatttgcctgcagtattcagtacagtatcatgcagtgtaggtttgtagccgggaagcaatacattgtaccatgtagcctagatgtgtagtaggctgtcccatctaggtttgtgtgagtagactctacgatgttcacacaacagaatcacgtgaagatgcatttctcagagcatagcccaccgctacccaacacatgcctgtaggtgaggatgaggaggtatctgtgttaaactgtgtcccccaccaaaatgttgacaggctaaacctcccagtgtccatgaacaatggctttatttggaaggagattttgcatatgaccaagttcagatgaggttattagagtgggctctaatctgatatgactcatctccttgtaaaaaggggaaacttgggctcagagatagcctccctctgaggctattaccgtgtaaagactggagttatgctgcccaaagccaagaaacaccaaagatatccggaaagccaccagaagctgggagaggggcatggaacagattctcctttgcacctcctggaaggaaccagccctgcagacaccttgatctcggatttctagcctccaggactgtaagacaatgcatttctattgttgaagccccccagtctgtggtactgtgttattgcaaccccaggaaactaacacaggcaggtagaccatccacacacaccaccgcttctctctgacgcctggtgcacagcttgggtcttgtggtgagactccacatggtaggcatttgctggcggtggatgttaaaaatgacaagatttcctctggtttgacttttgaaagcaggtgcattgaaagccaaatctcagggtttggggttggtttagaatgggatttctgaaacattctaattgtctcattgccatcacctccccaaatactgtatctttatgtgcatttggaaggaaaaggagtgcaattgaacagtatatttccgtctgttaggcaaaaccttttatttgcttcttatttttccaggcttggacactttcgtgagaatatttgcagttctgttgtaagtccacttcggtcagggatttggcaagtccacaacaaagagagggaatgtttcttttcccttttcccactttccttgggcttgcctgttctttctctgaaagatgctagaacttccccaaggggagggcctgcctttttcctccttgggaaatgttgatttatattatatgaaacatttgtttttcatagaaacttccatttcagcatgttgaaatagttggttctaatttttatgtgaaaaataaataaacttgtcgtggcaatactctcagggtacagttacataataactatgtatgcctccccaccactcattaacataggagatctcacctcacggaagtcatctcatagtctaagctttatggcttctaacagcttttacgaaactccatgaaaataccttaaacataactgttacaagttgaaagtcaaccctttttataagtatgtcagaagtaattatatcttgtagtagcaatttcatatctctacttatagttgggacaattaaggctcagaaaaatggcaaagctgagattaaaattcaggattttctgatttctagccaatgtcatgctcattttctgtgttaattttatggctcagggtccagttaaaaacgtctgaagggagtggtaagtacaagagagatgggagttgggggtggggcttgaaggagagcacacctggccccaggtgacaagactgggctccagccctgcctcatcacagttggacatgatggccctgggtcatttgacttttgaggacctcaggaaaatgagggagcttaaaaaattctatggttcctaatgaaatacttagggatgaaattacagttctgggatttgcttgaagacacaatcagccatggtttgtcactgttgatgctgagtaatggatatttggtgttctattgtgagtctttggtacatgtttggaattttccatgaaaaaaccttctgcttctaaaatgcacaccttgattcttcccatcgccctcctactggctggtcctgtgcagctcactcatttctcaggaacagcagcagactcactactctgaaggaaagaaagccctttgctttggtctgttcctaatgtacatattattagagacttttccgacaccctccccattttttatttcttaacagctaatacgatagctgtgctttcataataaattcaaaagctgctctctatttctcaccagtttgaattgtagaaaagagtacaaaagattagagtactttaaaataaatctcagctaattatacatacaactgcattcactaaatgtgaatattttcaggctttctttgctaccaagtgccacctgctcatgatttaaatgggcacaaatttagttccattaaacaaaatgcagcaactcttctcctatagcgcaaactcctttaggtcctattttgaaactgagaagctaattccagtgttctcttgttagctctcggtccatgtcaaccaccccacaaggttgtttacttgaatagtttgcagccttgctttaaaagttctagtaggcaaataggtttgttgatgatgaagtggtttgtgttttataagagtccttatggtctagatggcatttgaacttgtggttccagtgattaccaggaccctgaattgaagaatacatgctgtggccttttcagctcaggaaactttttactttctattgccaaaaaaaaaaaagacaagaaatccttcctcaaaatgttatgtgttcttagcccatacaactgtctccccagaagtcactggactcaaacctccactttgctacttgaacatattaaggtcatttaaggagaattcattcatctcctattaatctggaacattcatgatcgctgtaagaccaaagaggacattttggggggtaataagaaagttaaagctgccttcaaatcaaacgtgaattatgaaactcttttccaagaagcttctattagtggcctcatcagctatgtttcaagaaaggaagttgaaaaaaaatcccacaacatggaatgcgtatttgccatgctcttagaaaaatggtttccttgcgaagactcctttgtctctacatacctggacctgaagaccttggtgttgttttataaccctggaagcctggctgtgatcatctattaaggaaggagaaggaagctgcttatctgtcctgaaagtcttatttctactcatcttctcgcctccttccacaccacctccccacctacacacacccttgccctaaattcctttccattttgtcctttcgaaaactcctccctcccttagaaaagctaaaaataatggtaatactttccagtgatcctcccttattaggatctcagatgcaagctgcaggcaaggaggaaagcctgcatggtcgctgctgctcacatctgcatggttacaaatcgtggctcactccagctctcatcttagatgttcatcctcacttgaatcccagtgccataacacgccaacgcgcctggaaaacacctgctgtctataggttgcaagcaccccacagcatcccagatgtagggtcatagactcagagaattgaatacacacccaaatcctctagctgtcattagggggagtttcacatgattgtagctacacccaggattttaagcccccaaaagttatttaggaaggattgcaggctcattcttgtgttcttaggagggtcccgacctgcggataaagacctagaggaagggggaggccttgaggcggagtcccccaagcagagccccaacttgtgtgtgatcctgcgccacaacttggccagccggcctggacagctggctctggttactgtgggaacaatgcaaggaaggccgttgtcacattcctctgaggtcaaaggcacaaccttcgtcacacactcagtccctgctggcaaagagaaagacgaggagcgtggaatcggagacctggagcatgcgagggacttgagaaattcaccaactcccttgttttactgattaggaaactgaggtgcagaggagagctatgacttgctcaggatggcacacccaggactggaattttctcttcatggtccaataccctgatgttcctctcatcatctccagtacttcagacttgatagtaaaaaaggattcttgataacattattatattttgttatgttttcccatgctgcaatcgagtctttaggttcgaagtgacaaccctgttacttttgttgcgagacccttgagtactcccaggacaaatctagccaacaaatagcatctttagtgaccctatgggaagtcattggcttctagccctaaacccagaggttagagttaatttttaagtgctcgcctttaactcaagcatgaagctctaaaagcatcaagtagtaatgcttgaaaacatctaaattcctctgagccctaggcatgcttaaactctctctctctctttttttttttttttttttttaggaaaatagctgaaatggtagtggttagaacacatgcaaacagaattactgaataaaattggtcacgtatcccctggtttaaggcatatttaggagttcaattcacatgtaattgatcattcttttttctcttggcatactttcctgtaagagtcttatgtgccctgcctttagcatatgtgcaagccgataaaggatgttcatttaaaatttttactattttaaaaatacacacagagggggaaaagacttgtcttatccccaaatgaaaagaattagaaataatacttttgcctgtaaacttctatcagttttcctgtcatgggaaagggaaccataaattactttttataaggaaagtggtggtgctagggccacatgtcccctcccgcacagaatgagaggtggtggtggctgcgggacggtgggaaggaatgagcgggacccaggccagagctcagctccctgggctttgcttgtctcgcattttgtaaactcaaatgtcccatcattcccaaaggccatttgtggacatgctgtgattttatgcatcaccttctggaaagaatgtgttccgttccctgtgaacttatccaggttgatacagtagttccccccaccccccatcttcggtgtcattttctgctgtttcaattacccacagtcaagcgtggtacaaaaacaggtgagtgccatgcaataagatattttgagagagagagagagacaccacattcacataacttttagtacagtataatgttatgattgttctattttattattagtttttgttgttaatctcttactgtgacttatttataaattaaactctatcatgggtgtatatgtataggaaaaaacatagtagatatacataaaggtactattcatggttttaggcgtccactggggtcttggaacagatcctccatggatgggaggacaactgtcttttgaatgtgtcagacacaattgtggcatttcttagtgtctttttcctactcgttagttgtatttggctgctgcaaacaccttgggctcccaagtagttgggaatgtggaaagctacatactttccctctagagagagccccagtgtgaaaaactaagatagccgtgtgtttgctgatccttgggacgagccagggaagggctccgggagcactgtgtgaattaaggctgtcaagaccaaagtaacataggagggagaagatgaaaatgcagcagcacgtctcttaatgtgatcgtttctctttccccttactgaagcatagtgctctctgctatttgaagagcgcaatttagatttatattaaggaatgaataaataggatgcggtgatgaaatctcatctggagtgaatgcagattgtggatgctaatgaccgtgtggctgtgcagagaacccattggaagcctgggcgcttctccctcctctgttcacccactaggcactcaagagcaactcaggcagtggggaaaaggttatctttttttaatgtctctcagtgttgcatcttgccttatagcgccttaaagcacttgacaagccttcaagtaattcttggtggtggcgttttcccccagaaggccttaagagatggttttaatagatacacctatcaatttattcccaacttgagcattttgctgtcttgcatcatttgacatcaccagaaagtcctttggttacttctgtagttcacattgtactttctgtcctttgagttttgggtgctcaggggcaagatgtcagaaatcctgagttttagttgtgccactgcgtagctttgaccaagtcactttacgttagcaggatacaatttccgtgttcattaaatgaggagactggactgaaagctcttagaggcctcctctagctcagacgttctgtaacactcagggctttctgcctcctctgatttggcggtgtcaggatacaggtccaagtgcggcactgtgccttgcaaaattgctctctctccctggccagcttttccaccactgtggaatgaagtctgccgcctggaagaatcccagatttctcaaaggcgtccagttctagggagcagcgtgcaaagcccttgagcacactttgacttcttctgccctggctggtgatgaaaaaccaggtcaccagaggttgccctgtttccagtgatcagccctcgggactgaaaaaggaacaaatacagaagagctccaaagaaagaaacagaaagagacgctcaagctgggaagctaagaacaggtccctctgctggggtggaaggagaaagaatcttaatcctctgccttcccccatgggtcagagtcgtaaatgggtgagacttgaaggtgtggttggtcaccctctctcaaagtttcagggctgggtcaggtgtcctagtagtgttgcgtggtgcagtagtgagtccccagcctgcattctgcaaagccccagaggctccccataaactttgaggctgtgggctgccctcagcctctattgaccggggcagcggggcagcttctccttcagctctgtgatattctgaggctatgtaaaatagttttcttagaaaggtcctgtggttaaaaaaaattttttttaaaccactggtttagttacgatgagctcatattcaaagcaatatgaccttagacaagtcatttgattttcccaaacctcattttccttatttcaaaacaagtttagtcatatattctcagcctgtctcccacagcaatttaaggattaattagagtcagttattcataccttcactctatgaacacggtattgaacacctttcagtagaaggctctgttgggagaggaactcataagtaaatacatgagacagccattccaagcagagggaaaaagcatgtgcaaatattttgtaaactgtaaaacacaacacaaacctaacattatgtaatattgctgttcttaaccaggcagtttaatatagtgactctagagcctaactccttggctttgaatcccaactgcagccatttatcagtgtgacttcaggcactttacctaccctcttgtgcctcagtactccaatctgtacaatgggaataataatagaactcatctcactgggctgttgggagagctgaatcagttccgggcgcagtggctcatgcctgtaatcccagcactctgggaggctgaggtgggtggatcacctgaggtcaggagttcgagaccatcctggccaacatggtgaaacccgtctctactaaaaatataaaaaattagccaggcgtggtggcacgcgcctgtagtcccagctacttgggaggctgaggcaggggaatcacttgaacccaggaggcggaggttgcattgagccgagatcatgctactgcactccagcctggtgacagaacaagattccgtctccaaaaataattataataataattaagagactgacacagagtaagcactctataatgtttattattggtgatttcaccaatgcactgtgaaattctgtttcttgattctcagcattgcagtcccctgtcattgcacttccagttttctcttccccagaagatgcatcccgtgttcgagcggaaaggcaagggaaacatcatgtcaagaaaagagttccgaacagtactctgtttctgtggcatggatcctctttcctctccttttctcctttttttgaggttggattggcactcctctcagacttaaacaaaggctttgctttgcagagaggatctttctgccttcggtgtgtcatctgcctctaagggtgtaatttgtttctgatgcatgcagggtgcccccttgagaaggctttgttgatgttgtgcagaggtgtcctgtattgatcggtgatagaactgttctatagtgggtgaatgaggtaattgtcatcaggttactctagtcggtgaccttgaggctgatccgatgactaagccacagaggtggatccctggttatagaatgtccttgtttaaaggtaaatcggtgtgagagtgactaatagttttaaagaaatgatggcaagcaaatggcatgccctttggtgagagacacagtctatatcaataagctctgaggccacccatatctgggtgagatattggggctgattttcaagggttcctttatctctctgctcctctcttatctcttttcattagattccaattctccataacttccatgaccgtgtataatacagtcactgccatgactgtgtataatatcgtcagtgtgaagttcagagcaaaatacataggcctctgagctagttggctgggtttcttttttcttttttaaaaaattcagcagtggggtgggacagagctgaagatgaaaagatgcttgatacaagagaagagagaaagcaagcgtcatgataaaatctgcatgcaaaaaaacccttgttataaaatgaaaagtggaatgaatcattagctatacatttaagctggatcaacacattagccctgtgattaagagtttctaaaacctacctgccagcatccctgctgttgctgaactggtcctttctgcatgggaatgggtagaagtctaaatgaacagacttagagtgggttggcaggtgaaggatagtgggggtaagtagtgaggagaggataggttagaatagttattttgggctgggcgcagtgactcatgcctgtaatcccagcactttgggaggccgaggcaggtggatcacctgaggtcaggagttcgagaccatcctggacaacatggtgaaaccctgtctctactgaaaaaacaagaattagccaggtgtggtggctcatgcctgtagtcccagctacttgggaggctgaggcgagaggattgcttgaacctgggaggcgtaggttgcagtgagccgagatagtgccattgcactccatcctgggtgacagagcgagactatctcaatcgcaaggacaaaaaaccaaacaccccatgttctcactcataggtgggaattgaacaatgagaacacatggacacaggaaggggaacatcacacaccggggcctgttgtggggtggggggaggggggaaggatagcattaggagatatacctaatgttaaatgacaagttaatgggtgcagcacgccaacctggcacatctatacatatgtaacaaacctgcatgttgtgcacatgtaccctaaaacttaaagtataattaaaaacaaaaaaaagattaaaaaaataaaaagaacaattattttggaatcattgaataacagtcagctctttgtatgttggtcaataaaagcaaacacctataatactgctctaagtgctttgtgctatattaaccctttaatcctcacaacttttgttatgtaaattttatatctgaaaacagtgaggttaagtgatttgcccaaggtcatttaaacccagatattggctctgccccggtgcccttaacacttatagcctctcactgtcctgggtggtgaaggtcttgagggcaaagagagaaaggaaattcctattttcagtggacatatttcttgtgccggtggaaggaatttaattattacaaggggtttcatcaagtgcactaatctgggaagttgccagcaagctgacctgggtttaagtgattctcctgctttgacctcccaagtagctgagattacaggcatctgccaccatgcctggctaatttttgtatttttagtagagatggggtatcaccatgatggccaggctggtctcaaactcctgacctcaggtgatccgcccaccttggcctcccaaagtgctggtattacaggtgtgagccaccgcacctggccaagacaccttttttagcttccaaatcgaagtctgtttttgcctgtatcatggttgtatttcagttagaacatcatttctttttttttttctttttttctttttttcttttttttgagacagagtttcactcttgttgcccagactggagtgcagtggtgcagtctcggctcactgcaacctctacctcctgggttcaagcgattctcctgccccagcctgccgactagcagggattacaggcacctgccaccacgtccagctaattttgcgtctttttagtagtgacagtgtttcactgtgctgaccaagcccatcttgaactcttgacctcaggtgatccatctgccccagcctcccaaagtgctgggattacatgcgtgagccaccgcgcccggccagaacatcccaatacataggcagccacttatgcactagagtccttctcggagggtgagcagagttggctctccctgtcggtggcatcacgttggcagaatacacacacttttatcctgtggcggttggcgaggccattgatttgctgcgtagaatagcaaggaaatactctagacaggtttaacatttgttattgctaatgaatttgtcaagcatcggaattcagggacggttgatgcacacttaaaatgctctgaaatagattttaccttttataaaagataataataatctcatgtttgaatcacaagaggtacgttttccttaaatcttttaattaactcctatttcaagaaaaacctcttatcaaaaaaaaaaaaaagattttacatttcctaaggccaagtaagagttgaaggtagaatgagtaaataaccaagtttatggaaattgtaaaataaatacatgtgttataaatgtgctatttaatgaaaatgtgtattgactagagcaataatgatgtatctttgaccatgataagtaccagtgctgaaatccatccaagccacaaaaatgattggagggtccatgtggaatataaagctctgcagagtctagagctcatatcctatatggctttttgctaattaataaacattggccttttgtctattatttaatagcctaattgcattgcacattgcagtagcacattgcaatagcacattggcaaaagtgctgcctttcactgctaaggggggcagttttctgtaaaagaggttaaaaggagaaatcagaagcctaatttttgttaaatgagatgtcccccaaaagtcagatacatgcatatttgggctaaataaatctttcctgggaaactcttctatgactgggcagagttgttcacgagagactttccccccaacattttattaggaaaaattgcaaacatacaagtaaattgtaagaattgtacagtgaacacccataaacttgccacctagattttgcaaataatattttgctatatttgctttgtcaggtatcaagccatctgtccatcctgcagtccatcatgttttagttgatgcccttcaagactagttattgtgtatcattactcaatcaaaataaaatattggctttagttcttgcttttaggtaaattttattttattttattattactattattattattattgttgagacagggtctcactctgtcgcccaggttggagtgcagtggtacgatctcagctcactgcagactggaccttcggggcttaagcaatcctcccatcttagccccctgagtagctgggactacaggcataggctaccacatccagctaatttggtttttggtttttggtttttttttggtagagtcagggttttgccaggctggtgtcaaacttctgggctcaagtgatccaccctctttggccccacaaagtgctgggattacaggcgtgagccaaccatgcctggccagaaaaacccaaattgagggacagtccacaaaatgattagtctgtactccttaaaattggcagattgtcacttttatcacatcatatgtgacctatcatgggctgttgatcttgatgacctcagccgaggttgtgtcagggtttgtcaactttaaagttactctttgtacacagacacactcacacacacccttttccatactgtactactcgttggaaggaagtcactgtgcacagcccacacttaaggggtgggcagttacgctctacctttacaagggcagaacatctgcatgaattatttagaactcctttgctcaagagatgcgtgttttcttcctcttttaaaatttatttatatcaatatgaactcatgggtgtttattttattctttaggttctaatccagtactatgttgtttattttgttgctctggttgttttagttctggccattggcagctctttgagaaatattaggaatattgtctcttgtcccccttttatatgcccccatcactgtggggtattgatttatctatttagcattttcccactttctgatactacaagatgctccatgctcatcttggatattccctgtcacagtactagaatcagccatttctccaaagacccctggtttgttttattggagaatggtgttaggaactaagttctgggtgctggggcttgcagaaattttatgcccaacacatattagctccccctcttccttttgtgggagtttggtgtgtgcagtagtgagtgccctgtgaaatcttcatgctacagattgactttagtccctcactgatcctagttcacttcaggaggagcctagctcactgtggcagactagacagaaggcagcccagccagtcaactcaacagatttcatttattcagctcaatccaagtcagacttggtgctgtgcttattcctgtgggcagatgccctgccctcacagacccctgccctctagaatcaaatgacaggacagtaacagagaagtgctgtagaaaatcagaatacagaagggctggtgcgacctagcctaagagcattcaaagaaagctgtttatacaagagcagacttaggaaggtttattccagatgaggaggctagaagcaaagacatggaagtgggaacagatagtctcttaaatatctatggataagaagaaagccgaaaataatgaaggactttgcttcttgggtttattttaggtaggaagtagggtttactgatcttggtgggatgaggaaatggaccagtggtgtagtggagccagcttgcacttttatgagccaagtgttaaatgttcagaaatttggggagcatgttgacatcatgttattaccttgaaattggccatggtgggagtgtttacactacagaagtctgcaaatgctacacatcaggggtcctctctcccctcccacttttattaaacatttctgcacacaccactggcttcagctgtctaaatatctagtatgtacccttaccctgaatttatttttttttcctctagtagtctttttcaggtacacatttttatttggtgctttgaattctctaacaaaactgtcaaaaaatggttacagtagagatgtgtgcccctgattgaaaactgcattttactgcatattggttaaaactcttaacggtcagaaaattttttggttaactgggttatttgggaccctctaatggccattctcaataactgagttggaaaagtgcatgattcaaatgtactaaaccattacccagccttctactttattttggcagcatggggaaacctgttgtcacctgaaggtagtcatcagtgtcatatatatgtggtcataggatttatggttgggctggcttggaggtatcttctgattcttaccaagaatataggaaaaaacgatatcattttctttcagctgagaaaccatgactcaacgttattctgcttgtagtaggcaatgcaaccctgtatcagtttgacttttgcaaggatgatacctgagtaatccagggaatagtgctatgcaaatagggacagtttccatgaagtcacctcttgtgcatggtatatggtgttaagtgttatgccgaattagactcagagcagcttacatttcaaacgagtcacctaaaagcagttatatgcgtgacgaaggagaatggttagggaaagaagaagacttctcttactcataactggagattgtgagttttcactgtgatcctgaaagataggttggctttgccttaattacagggatttcttttacctctttgccctttcctatgtccctccatcaggtatggtaaattttcctagcttttgttcctattagtgactttactcctgatccactgccaaattgggtctctgaggttgtaaaactcagaaaaggatattgcaagcattctggccatattacaaatctcatgtgagagctcactctgaatcaaaggagctctcacattcttttttagtccaagtgattcctagatgtggaagccgatttcctggaacactcaaacgaggtcacagttcatcagctgcctcccataaaccaaccctctcaagtttcaactctcatttgaaacttcttgggatatcttgatccaaacagatcacctgaaaagctcccttataaggtcaagtgatcacaggggtcttcttcttcttcttctttttattgtgataaaattcatcatttttcccatttttaagtgtacagttcagtggcattaagtacattcacattatattgcagtcatcaccacgatccatcttcagaacgttttcatcttcccaaagcaaaactgcatatccatgttgtagcatgtgtcagaatctccttcctctttagggctgaataatattgcacatatgtatcacattttgtatctattcatccattgatggacacttaggttgcttccactttaggttattgtgaattatgtggctatgaacactggtatacaaatatctgttcaagtgcctcctttcagtttttttgggtatatacctagaagtggaattggtgaatcatgtagtattttttaaattttttgaggaaccatcatggtatttttcacagcagctgtaccattttgcatttctatcagtaatgtacacagagttccaatttgtccacatccttgccaacatttgttattttcttgttttgggggttgttttttttgttgttaatcagagccatcttaatgtgagtgaaatggtatgtcattgtggttttgatttgcattttcctaatgattagtgatgttgagtgtcttttcgtgtgcttaatggtcatttgcatattttctttgaagaaatgtcaattcaagtcctttgcccattttttaatcaaggtatttgttttttgttgttgctcaagagtcttcttgcatgcctagatagtacactacttcaagaggctatttagcatttatctggggttccatggggcagcctgttccctttgcacatatgtaatgcagagatgaatatgtagagacttaccactggaaaactgcacctggaattctcagatttgcccatatctgcttatcatggacgaggttcagtggtggatgctgcagaatataccaccgactgcttttggctactgtgtgacattgtcatctaacttttcactaagaaaaataatctctttagaggaaaggaaggaagttgagagtccatcttataatttttcagtgtaataatattctagaccaggtattgacaaactggaccatgggccaaatatcaccccagcctgtttctgtaaattaagttttattggaacaccgacatgcctgtttgtatgagtatcttcaattgctgcttttgcacgacaatgacagattgagtagttgcaatggagatgtctggcccacacagcctaaagcatttgctccctggtcctttatagaaaaagtttgccaacctttggctgttctaggtgtttaagaaatactatttttagaaccgtatatataatgtagtgatgttgactgcaagctattcactttgaaaacaataaagcttatgtagtagatattactgttttaagtatttactgaataagatagacccctgttacattactgcttttaagtatttactgaattccaattttgtgtccagagctgtgttctttgcctttgttttttgattggggcaatggctttcatgtccttagcaccactggggctgttaccagatgtgaccaaaaggtttctaacatgggtagcactttttttttttttttttttgagacacagtttcgctcttgtttcccaggctggagtgcaatggcatgatctcggctcactgcaacctccacatcccaggttcaagcaattctcctgcctcagcctcctgagtagctgagattacaggtgtctgccaccacgcccagctcatttttgtatatttagtagagacagggtttcgccatgttggccaggctggtcttgaacttctgacctcaggtgatccactggcctcggcctcccaaagtgttaggattacaggtgtgagccactgcgtcctgcctgggttgcactttttaaagtcacagaatctgaattctgcctttcctctgtgatatttcctattcgtactaaactttggtgaagtagctctgatctttagctgtggtgagaggagttatggaagagggacctgccccgaaacgtagaccacaggcaacttgctgcctggcaccctaaagatggtttcctgcttctcttcccctctatctccaggtcagagatgcagctttgctaaggcagtgattgccaatttgggaattttgagatactgtggatgtgctgattgttttgtacaaattctcttcaataccttgaccatgtatacagtaaacttatgctagctgttagaggacttattaaggtgtatggacactgtctttgaagagtttatatggtatgttttggcagttgaagagtattaagcattgacttaaaaaattatgtataataagcattgagataatgggaaagaaatgctacacatacacacacacgcatacccacccgtgaacacagacacccaggaaatcataaaacctgattgacttctatgtgtggatgttttctttttttattcatttaacttatattttaagttcagatgtacgtgtgcaggttcgttatataggtaaacttgtgtcatgggggtttgttttacagattattttgtcaccaggtactaagcctagtaaccattagttatttttcccgatcttctttgtcctcccacctccaccctccagtagattccagtgtagatgttctcttaagtaaaacgatggggtagtcgttttgtacagtccaaataagattccgacaatggatgaatctgctaagaggttaccttttgctccagatacaatatttatctaaaaggaaaatgaacccttaacccttccatggaatcgtactgcttcactaactttttgagtgaagtgatgggcattgatacagtattgaaaactttcaggcccttttctttactttttgacaatttgaccttttttcacccctgaaatatagcaatcagtatttctcttctggatctggttctacaacctacgttgattttaattactttccttgaaaaccattctcaaaatactctctgccccttacattttaagctttaatgttgaaaatagagctttggtaagagtctccttgaaaatgattttcttcagccaatatcagaggagtatttccttatttttatatttatatgttttaattccttaagaacagatatctaccaaatttcatggtatagatttataatcatcttttcaattttagacaaattttggaattcagatgttgctctttgaaatgctggtgacttctccaacttggggacattcacggactcaataagcatgccttttatttatgattctctgaggattcattcatttctgcatattttgaatgtctgctacacagagataaatgatgtaaaatccaggctatcagagctgggtcacaatttagtggagaagatgagtacgacaaaaatttaccatggagtgtgaaaagtgctcctcatagagacatgtacatcatgccatagtaagtttagggaatttggaaactcacttaagtcctaactcaatttaaattgtgttagactgtggataaatttatccgacgagaaacacataataatatgtatctactctgaggtaataaatgaaaaaagttggataaaataaaatacatctgttataaccaatggcccccagcaaggccagtgctcttgagccattattattcctgcacattctttgtgtttgggttattaacattgcgcttaggtcagatgagcgggtgttcaatctgccacactttgataactaaagtaaaatgctgatggagatcatttaagactgtctctatgctgttgattgcatgcttgtggctcataatcagaatgatgcaaagtaattgttagactgacttgccaaggctacattttgtgtcgttgccactgtcagcactttggtcccgctgtgctgcctgaagaacgcttgcctggcacctgttgggcactaatacacaactttccactgaatgtcatgggtaacttttgttctcatatcctcgcttgctatcttcacaaaaaaaaaaaaaaaacaaaaaaccctgacaaagatttttttttttttgacagagtcttgatgtgttgtccaggctggagtgcagtggcacagtctcagcttactgcaacctccacctcccaggtttaagcaattctcctgcctcagcctcccaagtagctgggattacaggcacacaccgccatgcccagctaatttctgtatttttagtagagatggggtttcaccatgttgcccaggctggtctcgaactcctgacctcaggtgatccacctccctcggcttcccaaagtgctgagattacaggtgtgagccactgtgcccggctgcaagtgcttattttttgtttgtcagaatgcttatgtattgagactttaatctctcgtgcatgttgccagggagctcatcttttctctttgaccgtgaaacccagacaaacctagctttgtcacttactggtgaccttggttaggttacttttcttgagccttattttcctcatctgtacaatgaggccaataaaacctattttacagagattttgtcaggattaaagataatagataaaaatgtgtccatacaaattagccactcagcaaatggttgtggcaaatattaaggaatttaatacttactcaggatgatacaatacaacgacaagacaacatttccaaaagttagtccgaaaatataatgataacgtaactgtggaacatgtagtatcagcacggttttactgggcaagtcatgtttaccagagacacacaattggatttggatgttaaaatctaaaccgcatggttttatggctagatctggaatacatgatatgttatgggccctcccatgtataccttcagaggatatggagctacctttggaagcaatgtatgatttagtgtttttctttttttttttttttttgagagggagtctcactctgttgcccaggttggagtgcagtggtgcgatctcagctatctgcaacctccacctcccgggttaaagagattctgctgcctcagcctcccgagtagctgggattacaggcgtgcaccaggacacctggctaatttttgtatttttagtagagacggggttttgccatgttgcccaggcttgtcttgaactcctgacctcaagtgatcttcctgccttggcctccgaaagtgctgggattacaggcatgagccacagcacccagcagatttagtcttgatggtgtaaaaaagccattgtatagcacacaacacagcctgaccatctaatgctcactcatgtaaaagcggtgaccacgagagagttgggcaaagcaaaaactctgtccctataagaagtgcattgttagatctggaaacatctcaccaggtcctgaattgtactatgaaaagagatttgttaaaagtagctcagttcatattccatgatattgcaaatgcctagagtgaattgtcaaagaaatgctctctctgactccatccactgctgacatttaaggtctgtgttcttagttcccaacattgattctatttcacatggtcaaaatgtaatagacatgttttttctaagagcatgacccccaccacaaattaccactccccttaaaaattgcatcggctggaccagggatgaagcatttagggagcatttgttgtaagggactgtcacctgccattggttatggaccttggtttcacagatcagactctgtgttgctctactttgcatctccgcctttgatctcgctgggattttgcagccagtatctatctcctttggcatttctttgctgctgctatgtgttctttctccctctgctgctctctgccagccccatctcctgcctgattcatggagcagtgttggatacttagaaaaggttaactgcattcgtgtctccatggctggagacacgatttccacacactctgcccattgcggggatatgctcacttccccagcctcccctcaaaagtgagattttcctggaatgtcactagtcgcggggggaggtatggcacccttaattgagggcaaggatgtgtcatgtgacttcagcaaatcctatcacatatatttttaccaaaccaaccattctctttgagaaggaacttagattagaaatattaacactgaatgaatattttaatttttgataccttctaaagaaatatggtaagtcctgattttttttttttttttttaggttttcaccttcaaatagtgatttaatttctaggatcactcaagatcatacagttttttcagttaactttcctctgtatcattaagtaactctaccatgattgggctgaaacaaggacatttgcttgacttcagacttagcgatttaatacttgatctagccatccctattcacccattatcccgagtctttaaaattgagtcctttttcgatatgttgaacacccactgaatattcttttttttttttttttgagatgaagttttgctcttgttgcccaggctggagtgcagtggtgcattctcgactcactgcagcttccacctcccgggttcaagtgatcctcctgcctcagcctcccgagtagctgggattacaggcacctgccaccaagcccagctaatttttgtatttttagtagagacagggtttcaccattttggccaggctggtcttgacctcctgacctcaggtaatccacccgccttggcctcccaaagtgctgggattacaggcgtgagccaccgcgtccggccacctactgaatattctaatgtgtgattctattccctgtggtatatgtgttagtttgtgttcttctatgctacacccactcaaaccaaaacaactttttgctgttaaggctttttatatttattcagcctgcctttctcaatcttgaaaaatgtagaagaaaaagaaccacatgctaccacaatatgtagtcacttcttataaacttgggacactttggtagactctgtaaattcaacaaataaatatgtattggttcattccttcaatgtaatactctttcagtcctcaaatgttatgatgttgatacatctattgatgttaaaggaggttttcaatataattaataagtaaaaaaaatgagacagcaaaatactatgaatactatcatagtacattataaatagattgtatgtatgtatatatatatatatatatatatagatttatttctatatgtatgtgtacaatatactctgtatacttgggcataggagagagtctggggtcatataaccagactgttaatagtgattattagtgggacttctgtggatttgtattacttgggtttttctatttatctaattattatacagtgaacagttttattttgttctcatttgtctcatccactttttttgactgcatagtcctgtaatttttttttaatttttaatttttttgtgggtacataggtgtgtatatgtatggggtacatgagatgttttgatacagacatgtaaaataaacacatcatgaagaatggggtatccatccactcaagcatttatccattacaacaaacactccagttatactctttattttaaaatgtacagttattattgactatagtcactctgttgtgctatcaaatagtagatcttatttattctaactactttttttgtacccattaaccatccccacctcccctccagccccctactacccttcccagcctttggtagccatcctcctactctctgtgtccatgagttcagtaggtttgatttttgaatcccacagataagtgagaacatgctaagtttgtctttctgtgcctggcttttttcacttaacataatgatctctcgttccatccatgttgttgcaaatgactggatctcattcttttttatggctgaataatattccattgtgtgtatatactatactttctttatccattcatctgttggtagacatttagattgcttccaaatcttagctattgtaaacagtgctgtaacaaacagaggaagtgcagatttttcctcaatatactgatttcctttcttttgagtatatacccagtcgtgggatttctggatcatatggcaacttgtctcatttacttgtgaggggtgaggaaaaagggaatacagtacaggtactcacattctggtaatttttgttgttgttgttgttgtttttgttttgctcttgttgcccaggctggagtacagtggcatgatcttggctcactgcaacttctgcctcccgagttcaagcaattttcctgcctcagcttcccaaatagctgggattacaggtgcatgccaccatgcccggctaattttgtatttttagtagagatggggttttaccatggtggccaggctggtcttgaactcctgacttcaggtgatccacctggcttggcctcccaaagtgctgggattataggagtgagccaccacgcccagtcacattctggcaaattattaagtcaccaaagtctctcctgtgtctttcctccattgttacagatatatgaacatgttgtgtgccaaatggtgataatgcctttttgttttattcagtctcttctgtgtaccaagcgccacactaaaaactagaaacattctatgaagtcgatattgttattgccattatacaaatgaggaaagggttcagagagtttaagtaactggaaccacacagctcctctgtgactcagctgaggctcagactgaggtctgactttgaaatcagttttcgtggtctcaagaattcgtactgtagacgtctcgtctgttgttaggatgaaaaggtcaatgcgtgtgagtggattataaagtgttgctttaaaacgaagaagatactcagagattttgccagtatctaccatttttcaatgtttgcatggctttctggcagtttttttcaattggagcataacctttgtctttgcagccccacctagcctaggatagtctgactgcatagtaagtgtcatgttaaacacttgtgggctgctctgtgggacttggaggagtgcccttcagattctgaggaactgagtctgggaatcttcctgcaggctggtgggccatcctgaaaaagctctatcctgccctggtggccggccacatgccgtccacgtcctctgatgaaaagggcgggaaagctgtggccttccacagctcatagaatgaatcccaaagatgctggaatcctgggaaacttgcccacagaacatcaggagctggaatagctttgcctcacagcctctcttaaacctgcaaaggcgtctttaaaatagtctctggagattattgttgagttggatcttgaacttagttccttgtgtggtgtagattaaatagtctgttgccgtcgctcccttatctccctttctttcaggcttcctctgtccaacattcacatcatctctgttctttcccacactttgtttggcccgtcagtatctcagacactgtggcttcctcacgggattactcagtcagcctgatatgtggcctccagcgcccctctgccaagtccacattcccatatgagcctaattacatacagatcactgcagggagtgaagctgtgggtataccattttgggaaagagcaaagtgcaggaatggggtactttggttatttattaagacttcttcacagcctggcaatgtagcaaaactccatctccgcaaataaagaaaaaacacaacattttaatccaggtgtggtggcacatgcctgtagtcccagctacttggcggctaaggcaggagtttgagtctaggagttggaggctgcagtgagctatgatggcatccccatccacggtcactgaattcccccatgagagggactttggagggaggatcccagggtctgagctcagctctgccactcacagccatgtgcacgtgagcaagtggctcagtcccctgggcctcagggtttccagctataaaatgggcacggatctatgacaaacccgggtaacaaagcaagaccctatctcaaaaaaataaaacacggctgggtacgatggctcaaacctgtaatcccaacactttgggaggctgaggtggaaggagcgcttgaggccaggagttcaagaccagcctgggcaacatagtgagaccccatctctacagaaacattacttcaaaaaaatacaaaaaaagacttcttcaataagcatcatggtgggcatggaggacatgacattttaagaaaggcacctaaaaaattgatttcttgggcaccacaatatggactccttgtcacaaggaccatacatctcatgataaatgaatcatgcctgtgattgttctctacatattgattgttcaaagctctgcttttaaaattcatatagtcagccaaataatcacgcatctattgttcttcagacatttattgtgcacctaataaaggccaaagtgctaggggctggaatttcttatcacctctaggcctgctcatttggactgatttagagaatggagttattaatttttttaaaaaatctttttttctattccagttttccaaagaaattagaccattttcttcgtgagaaagaaatcgacgtgctgttttcatagggtgagtgatcctttgaatctttcatgtatttttacccacatcaaaatattatccaattactatgatgcaccaagaaaaagtgtgtgacagcatgcactctctagttttctcctgcttggaaccaaggtatttttcctattctttgactctcctcatcactgggtcctttggagaggatggtttcccttgtagatttttctgcgatttcttttttgccgttcacatgctttgcctcgtgcgaggtcatcattgttgctattaccttgtccagctcacagaaaggaagtttctttccctcagcaactggtgcacagagatacagctgtaggcaagggggaaccatccagtttcaagtgactgtgatgtcttttgaattccatgaccaagaataacaggatatgagcaccagatgagacctgagagcttgtctggcaaaggccctatgtacagatggggcatctgaggcccagaggctcacatcacctttatggggcttcatggagagtagcagagctaggattttgatactggtgtgtttggctcctagctgcatgatgtttgccctgcacaagtctggttttggaatctgcagattctttttgaggctgtagagttataggtagtttaacttaatgtggtcttggtaatctaataatgatcacccctaaggcaagggtcaagactgatactgatagactatttgactttctcataatcctagttggctactaagtaaaggggttggcagagtgagtgcacccagaacacttctgttatggatgtcatctgagaaagcttattttcttctgcgccctttccaaaccactgcatctgcaatgccacgttgtcatgtgctgagacttggtggtacatctgctttgcagctagaagtcatggtacacctgcaggtgtgtgcagtccagctgcagacccacacacccgactcgcggttgtctgcacctgcagaagaatggctaacagggttcctatattgaagtacaaatctgaccttcatagagacttttgagaaacatttattcttttattttatttgtttatttatttactttgagacggatctccctctgtcgcccaggctggagtgcagtggcacgatctcggctcactgcaagctccgcctcccgggttcacgccattctcctgcctcagcctcctgagtagctgggactacaggtgcctgccaccatgcctggctaattttttgtatttttagtagagatgggtttcactgtgttaccaaggatggtctccatctcctgacctcgtgatccgcctcggcctcccaaagtgctgggattacaggcgtgagccaccgcgcccggccccatttattcgttttttttaaagttatgttggtttttacataagagtgcagttgtgcaataagatggagagaagttaagaatatgattctcagttagaatcccagaaggtaaacttgactgtgtgtgtggtttgtttgtttgtttgtttgtttttttagacatcctaggttaaatctggcttcaaattgtgttcatttaggttggtgaactaagtgcacttatttccaaaacatttcatctcacctagggagtggtcaaagggtagtattaagagcttgtgtttattattttatccaacttgtcagcttaatcactttgtcttcttccctaactagagtcattattgcggaacttgatcatctccttatgtacatacagacgtaattggtgtctaccaacatactgaatggaatgtagaacatagattgctgatttgtgagggatcatctgctgagttaccctaacattgatcgctcctgtccacagagctgggtctacacgagttagcattcattagaactgtgaaggtttccattttcctgtcttatctgagaaaagcccaaaaagtttattctcagagcacaccacagtacaatgtgggtcactgacacctgttgctctctggggactgtaaaggtctctttagagtcaagagattaattagactaaaagaagggggcaattaagggccttgagaaagtgaagaaatgtccatttccatgcttacatcataggattctttgggtaaagaataaactggtagagaagggtctgaggcaagaaatggtgaaggaatgaaagaaggactgcctgaacccatgtagaccacttgtggctactttggtttccttctggggtcatgagcactttgatgttgacattcaagagggcatcaaattattatccaaaatattacaagccgtaatttttttattttaccaaatgagaaaaaactaaacacagatagaagccatgagtatttttctccctaaaaagaagctcagaagctggcccccacatgcatatataccttgtaaaacgtgagtccctgggctcagtttcatggtatgcaatggggctgggtcttgggaacaatgctgctgttgtttctaagctcaaacagcactcaccatcaatggtatctctttaagggaaatccagggaaatgctcttgccagcgctgtgattttatttgctagaggccaggtggcaatgacatgcattggttccatagcaacgtgactgtgctgccagaaaacatataatgactgtgacagccagtgtatcctgggcaggatgagggcagccctgataccctcttttatttcccaccttatcctctcttgcctttcccctcctggggcctgtgatatgcggagaatgtggttttcgtaatggttactatctactcttgctattaacacttgcctcctgtctcggtccatcttggaacttgatgagagacaaggcaatgcctgtaggagtgttctgcaggcctctgaatgggtcagcagggttggcagcacctgcctgtcttagcaattgaaaggaggtggagagtctgtgcttttcatcctccctgtgtgtggcacagcggctctgtcagaatgacctggtggggagggtacttcctgggcatcgtggtcagctgctcctggctgaaatgtgtgggtagtgacatggagcaatgtgaaatccagggaaacagagtgctcatttaatatgctgcagattgaggagacacctaccagtggagcctgcaatgccaggcccagtaggactgcacagagaaatgcaatacccatttctcatcttctgggagctcttaccagagaggcagtttctaattgcagtttctctactgatgtgtggttggggctttcacatttctctaatgtttcctcatctatataatccttgatgaaagaattgtaagaactcttagttccaacggatactttttttcccctctgaactcctgaagcatttttaaaaatctttaccatccatttgacattgctcttgtatttccttttttcatatatattgctttgggggcctgagtgttttctaggtcgaggctaagcccttcaaggatacgaaacatgtatcttcttcttcctcttaaaaaaatttctctaatgctcacaactgagttctgcagatagtaaccatgacattaatatttgttcacgacaacgttatattctcactccatctcccaaggaaattgtgaggcaagtgtgtaaatatattgaaaatgttgttcagttcttcaaagaaaagataaactcaagaaattattttcctaatgtggtttttttaatgcagatataaagtcacaaggtaagaatatctaaaggcttcatatttcctcatcttcctctttctggctactgaccatagcatatacccctgggttttatactggcaccaaaatcatcctttttcccacctcactcccaatattcactgtattgaatttgtctttgggatcagacttctcagtctagcgttttggactattaagtaagagatttgagggatttttccattaagatgacagatagattaggtttgatagattaggatagtgattcctaatttggttttgaggtctgtttaggggagggaaggtttttatcttatggaaacttttatcttacaagagttctcttcccgtcccaagttctgagcccactgagaaataagacaagagtattgaggcagacgggggccagaatgcaactatgtgactgagggcaatgagctaacttgacacctgcctgttccccagtctagcctggtcgcaggccacctgcaggaaagttttgagtctacaggcacctgtctgtgtgaagagggaaggagaaagaggcccaaatccctgctaaccctgctcaaaattatatagattcaccctatccaaggagggggcataggccacgttggctttagccccagccgggttactcattccacacccttggggaagaaaaggttggagcaagaggtcagagggcataagggaaatcctcccccatagaaagctggggtggggcgtggcgtttccttcctgctctggccatatttctgctccctgcaccccatcaggcctacccgcccccagctcactcaagccttcttacctgttgttttcttcgtggcgcttgggcttctgcatccgactgctggtttattgttagtctcctctattagaattagctcagtggaagcaaaagccttgtcggtctcatggactgcatgtatcccagtatttaaaactgtgccaagcacataggaggcatttgatcaatatttgttgaatgaataaacacatagatgttgtttgatgcctctgctcacactctttaattacctggacatccctggtgccctgtcttgtctggcaagtctgtaggagctagttcagcaatcgtggtctcttcttgctctgtatgtagctcatcagttggcagtagttggcatgtgtgcatgtgtgtgctctcatgtaggtgagtgtgcatgtgtgtatctttgtatgcatgtgtgtgcacctacatacctgtatccttttgtgcatatgtatttgtatgtacttgtgttctctctctctctggctctgtaatacttcacttatttgtttacatatcttttacccttactagattgcaaatgcttgaagaactggggaacctgttaatcattcttgttcctctaatatctgccatgtagtaggtgctcagtatatgataatattagcattctaagcacttacaacatgcccagtactgctttattttaaaatttaaaataacttttatgtatcttgcatatattaacttgtgtaattctcacaacaaccttacaagatacattttaaactcgttttgtgggaaaggaaactggggacatgaagaggtcaagtggctggcccacagtctcacagctagcctgactccatagctttttttctctgctacctctcagaaactgactactgtatttgtgtgaatgaacaaatgactgaatgagaattttagaagcccagaccaaaatcattaaatagacctaaagacattagggtcaacacaaataagtaaaaatgatgagccatggttgacacagaatcaaggccatggctaagataaattcacagatgaatagctaatgccttcttgtagccattgcacttaattcctgatgatccatgcctgcatggtggtattggttaatgcaaatgaataattgttattacgtattgggaattatttcctagtgggaaaatatcaagtcatcagttatgagttaagcagctactgcttgcgaggctcacaactaaattttggggaaaatgatgagaggaaggaaaatgtgagttggagggtgaaaaggtaagccctgaaagtacaagccaaggtcactgtcttcaagaggctcttgtctcattaagtggcaaggagtgagtaaaagtgacattaaggcaattaaaagatactgagggcagtaaatataaagcctagcacaaggcattgttagacatgattcattaccaaatggtaataatagagaaaataaaagctattgtattagtcaggataggataagcttttgttgcagaaaggtcaaccctaaactttcagtagcttagcaaaataaaagtttatttctcattcatacagtgaccgctgtggatgcagtatctctccaggacaactgtcctccatgcataactccatgatgcagtctgctttgatctttttatccagccatctaggggcctctttcatgatcactggaagagagaaaaattggaaaattgcaccagcaattcaatgcttcaaagctttggcctagaagggacacttgtcacctgctatgtcctaagcatggcttttagctttttgtataactcccaacgtcccagtcctctcacacagcacacagtaggtgctcgataacgtgtagggtaaaagaatgaatgaacttaagaatgcattgtgacttgctcctgatggtgttgtagcagtaatatacctggcagcccccaaagcccaggcttggaacagtcagatctggctcaaaaatatttactaaaattaaaagagcattaataaaaataacaacatagttaacattaattagctatggtgatgggacaatcataaggacacgggcaaattaaactcaatttagcaggtggctaaacttacgctaaagccccggcctgccagacattggccttgtcttagacacatcactgtctaacagtccagagctcaactcacagttcacaagtcatctggtcccatcttgtctttctgaccttgttcctcctgaatgagatggagatcattaggcttgttaaaaattaagaagctttattaaggcaaagttaacctgtctgggatgcttccatgattccatcccaggtgtatggaccaccctataccatccccctcctgcatccgcttctctcatgctttcatctttcatctggggtcctggtgaacagaccacaattcagctccagatcaacgaagaggggcttccagacaggggccacgcatatgctgaggaaaacacagcaatctaacatgtaaagtaagtgggaagctccgtgtaggactcaacacggagaatggacagctcatagagagaaagggggagactgccttggacagggagataggggtcacaccacatgtgtcagaccaaagaatggggacccctcaaccacattcgctacgtgtgtattatgtggtgaagagaaacctgcctgcgaggaggactgagtcccagccactgacagattcccaggacacggtgcttcttgttggtttgtggtttgggggtggtagtggtagggagggaggagtggtcactgtgtaaatgggcagtgctgtggggaggggtcctgaactgggggttggcagtcactggagatttttcaacaagttggggatgtgaagaaccatgttttagtgagatgagctttacagctgtgtccatatcccgtgagatggtggagaaaaaagagactggggtcccagagggaaggcagttgcaggcgtaaggagataaggttttgagaactactgtgggcgtgttacaaagggaccgatgtggaggacactacaaagaaagagttgaacaaactgagcaactgggtattagaaacaatgaaaggaatggagtcagagataacccaatttttgagcctaggtggctaccgaaggtgtcctgtgttgtactttatggatattattattattaattattattattattattattttgagacagagcctcgctctgtcgccaggctggagtgcagtggcgtgatctcggctcactgcaacctctgcctcccgggttcaagtgattcacctgcctcagcctcccaagtagctgggattacagcctcccaccaccacgcctggctaattttttgtatttttagtagagatggggtttcaccatgttggccaggctggtctcgatctcttgacctcgtgatctgcccaccttggcctcccaaagtgccgtggatattattttaataacagtgtcatcccatgagatagagagcctgtggcagaacccagggattgcctgggacccagatatgcccacgtgagtatctgagttgccttaaccccacctcccttccttcgagccctccctccccaaggtttaggatcaaatcttaaatcagcagcaaaactgccaggctgaaatttcatctccatcctggccctctagtggagataaaatggtttgaatgtgggcgagaaagtaaaacggaatgtgtggttgctgagtctagctgttgataagagagggttcaccatccacccatgagaactgtctctctcctgctggtgtgcctcgctctcagacgcagcctccctatggctctgggacatgaggggtaatgtcttgccggttggtaaaattcttgcaagctgacagtctttttttgtttttcttttttttaagctccacaaggctactgcacattgcgttcttgctctttgtgatccaacaagagggagtcagttttgatttgggagaaaggaggaagaaagctgtttgatgggcgagaggaggcatgtattgattgcattcccgttttgctttctggggctggctggtcatgtcactcttcatagctgcctggctctagtggtagaagagagtctaatgagagacgctacggctgtgtgcagcttgcacacagcaactcttcagctccaaggaatcagagtgagctcctgagctccctgggattcagaggtgcctcagccccaaatctttttcccctgcatttaggctagaacaggaaagatgctactgggagagaagagaattcctgacatcttgcctttcttgtctgctttctgcttgggtctgtggagcagccacctctgggcagaggtgcaggaagtgtgacagaacaggaaagctttaaagtcactgtctccctccctcccatgccctaggctacccttgctggtcagaacctcctgcttactctggtggacagacacctgagttgctgctcttgatgaagtttctcccacttcttcaaaccagcaaggcataggaccccacttggcttggaagacacgtgacgctcttgatcatttcagtcccttttacatccccataatatcaccgtggcctgttagattgatttgtgagtaagattccttgcaaatagcaagatgatcggaagcctctatcttttccgggggaggtgcatatttaaacagacagcctaagctatttatagattgtaatgtattgtgttacagggaaaaggtggaagtcaacagtaatgttctgttccccatttcctatagtttcaagcatattttcttgctagtcctagagactttaaacatttagaatctccagtgatatctatattcttttgatgtactttgtgtagaaactcaagcacgagcaggcttcagagtcagctaaccaaagaatcttggggcttttgatcactttccattagcacaaacagtgatctctgccctgttgtatattgtttgaaaggacatttgctgtttaatgaagataaacatgttgctgggtttttaatatgtcttctcaactcaggagctgaaaaatgcatacatgagattagttctgttggcgtagaagggattctgcgtgccccaaacattttcctagccgttggctgaacttttgaaatgtgctttgcactgcaagaacagatactgaacagatattttacttagaaagccttctgtttcaatggtgattcccaggggccactcaaccacatcttactaaataatatttggtcaaaagagaaacgtgagtgcaagaaggacacatgatcacagccactaacaaattcctagaaagtgctgcttgttgtcatttctggttaggaggtgatggtgatggcaggtagagggtctaagccattctcctgtctctcttttaaagtacattcttctgttgctgtagctcctggcattggctgtcaccctcacttgcaggagggagggaatgactgtttgttgctgttggtgtctgaaaatctgtgggcagaacttttagaaaaagcagaccacagagcctgctatatattttgttcagcccattctatttctcttcactttttaaccgattgcgacaaaaaaaggggcctgccttctaaacttgtctttatctttaaaagagaataccttttataaatgcttagaacttggagatgctgttgtttttatttagtatttgaaaagctaagtatgctgacactgtcctgggagtgcaggcccctcattgagagagaacagtaaacacagcaatgactttgcttttaatttgaaatgcgttactcttcttagagctgaggggtgatttgagatgttcctgttttcacattcagctatttcctggttctgtgatcataataaattccatagctccaaaacattagagcaaattgtgtcttctgtaggagttatttacggatactcaaacaaatggtgctttctgaggaagaagaactgtgtatgaaaactatgtggtaaagcctttcatatctgccgtggtggcagaacttctgaggagctggctttgagggtaatgatatctttatcaccctgacgctgaatggaggcggggaggcctttgtgtgttctgttgccaactaacacctggctgcctcagggcatcctgcctggtaattgaacccatgagtatgtacaaagattagagggaccgtttgaggagaaagatgggggctggagaggcaaggttagtcttgccattataagcttaggtgcagaaggaagccaagctacctggaaggccacctcgtggcaaagacacccactaaggcagggcggtggcctgggactgaccatcaatcacttcccgctcattctcctcagaactgaggactgttgtcttcagtcttccccagcctcgcttatcttcctcctgcttcctgaaggaaatatccttttgcaatgggtggactatcaacttgaatttttagcaagcaggctggagaagtttttggaagttttggagacatggctggtcttgaattcctgggctcaagcaatcctctcactttggcttcccaaagtgctaggattacaggtatgagaagtttttggaggtttcggacttgttgctaggttgattctgagggagaaaagacctctgttattcagaaggttgtggacttctgaagaatggaaatcgggcaccctgaaggaaacatatgtcaatcctagtcctggagctagcatggctcaagtttattcccttaaatgtctattgtgttaaaacataaaaagagtttagatatacttccacatctttgcagttgttagctctctggacatttataaagggaaaggaagagtgaagcagagccccattaattcccatgcatggtgtctgctgtttgaatcctggaaatcaggatgattttattcacatgttaatgccctctagtggctagtgaggtgccctctaagcaggactttccccagcttccaccccttcctctccctaactaaattaagcacccactttacagtagttgagtatgtgtcatatcaagtctgtattttcttactaagattcatctaccacgtgggaaaaaaaaaatcaaaagctttgttacagttcaaagaacgtagtgctgttgctacatcaagtgaggataaatcttccatctgtagcaatctgtattataagtctactggatgtgacagaaaactctttaaaactttgatgcacatattttcacagccaaccgatttcattaaagtgggagaagtgtactattggcaagcagtttttctgctgacttcccacccttaaatagacaagctttataaaaagacaaaatcttcccagatctatttggttggccaaggtgacatttgtcttcctccctcagaaggttggtaaaattaaccttctgctttctgtatacctttactgtatttttatttctatttatttatttatttatgagacagggcctcactctgtcacccaggctggagtgcagtggtgcactcacagctcattgcagcctcaacctcctggggttcaagcagtcctcccaccttagcctcccaagtagcttgggactacaggtgtgtgccaccatgcccagctaatttttgtatttttggtagagatggggtttcactgtgctcctctggttggtcttgaactcctggactcaagtgattctcccacctctgcctcccacagtgctaggtataagccactgtgcctggccctagttttatataggtaaagcattagtcactcacaatgatctttgaatgagttatgtaagttatgtttggtttctcctactttgttttcctagtcagttcaaccagtcaagtatgagatgagtggctgctgtgagcttgatcaagtgggtcggaatcccctgggaatattgttaaaatgcaggttctgatcctgtcggtctgagatagggcctgagatgctgctggtcccaggaagacactttgaggaacaagttgctaggtgatgcagaagacagaagccatatttgattttcaaaaatcctatgatctgaaaaggaactaggagaagtatacaaataagtatggcataagacagaaggtgataaactgtatataaaagtaaaaacacgcttcagagggttaaagatagaagtgatcacttctgattgggaagatcaggccaatttccacagagaaggtgatttgggaatgggattttagtttgcaacagggattgcggggaggcgtgcgagggccattgagaccagagacgcagattctggaaagtgaagagtacgttctggaacaaggggccacccgtatgcctgtgatggggaaaagtgggagataacagttgggaaggtaagtggaagccatattgtagactgtcagacagtctgggatggaaactctggacttaattcaggaagcgaagaggaaccagcaacaagagattttgaaacgagaaagaagattgaaactgcagtttagaaagattcatctggcatgtatatgtaggatagacgggagtggggagtgacagcccattccaagagaaggagtagtagataggacagatagcatgattactcttagcaatggggaaaatagagactagatgcgatacagagagagaaggatcagaaggtgtccaggggctgtcagagtttcagtcctgaatggctacagaattaccataaataggacagtcagaatgagctatcgaatgcttttgaatggaaaaatgacctgaatgagtgcacaaatgtcacctccaagaggccttccttgtccatcctatctaacatagtatgccggtcttcttaccctgctttgctattttcatgacactttttactgtgacattaaaaggatggcaagaaaaacagggaggccaggtaagaaacctgtagttgacaggatagaaaatgacagtggcttgggcttgaatggtggcagtggcatcagagagaggtagctgggttcaagatacagcctgatagtatccagtatattctcgttgtgcatccagtctcagctgtttgtgtcttgcaaaactctgtacccattagacaataaattcccccttcccccttccccctccctcctggtaatcaccattctactttctgcctctatgaatttgactgctctagggacctcctatgagtagaatcacacagggtttgtccttttgtgactttttgtttagcataatgtcctcaaggtcatccatgttgtaacatgtgtcagaatttctttttttaaggctgatgaatattccactcttgtatatatcacattttgtttattcattcatctgtccataaacacttgggttgtttccaccttttggttactgtgaataatgctgctatgaatgtgggtgtacaaatttgaggttctcctttcagttcttttgggtatatacctggaaatggaattgctggatcacgtggcaattctatttttaaattttttatgaactgctgtatcgttttccacagtggctgcaccactttgcatttctaccaacagtgcacaagggttccagtttctctatgtcctcaccaacagttgttattttctggttaaaaaaatgtatttgatagtagccatcctaataggttggaggtttgagacctttttttaggggatatttcagatagacagttgagtcttcaggcctgcagctcaagaagtctgggcctgcattataccatagaagttcatatttatgccatcctttatcctttcaatgaattttttggccagtttgtctataagcatttaaggatttagagatttctattaaaccatcagatttgtgcttaaattatttaatctcaaagacattttaaataatatatacattaatttagacatactgctttcttccactttcatattatatgaaataattttacttacaacttttatctactatatcagtatcttcctcacgttttgaactacatggcaggtcatgtagtatcgttttccaaagcacatcatcttgacgttcatctactctgtgtttgatgctattaccagaaatttcatcctaagccgcaagtgcccattcctatattcgttggttacatttgttgagaccccattggccaaaaaaagacatatagccaagcccacagttaatgtgagcatggctatagggaggcatcctacattggggaccattattgtcacaatatcctaaaccatattattaagagatgtttttcttcattcttcctgtgagtgtattttgatgaactctgcaacttaaccacttactgtgttgcttttaaaagtaatctttaaaatgcttttttatttatagtgacatccagtgcttgcaactaggaaagtcatacttccaagaataattactagtcaaatttgttttcttccattaaaaaacaaaaggaaaaacagttctgttaggtggctgttatataaacatgccaaactagcatttatcaaggtagttttaaggtaatatgtcttccataaagactactttatttaagagaccaatagatacaataaactttgtaagaactcaaaaattaagggtacttaggcttttctgagggctttctttggagaaaaattaccttatattatattaccttttattcaggcatacataataattgtaaatttggctttggagacttcagtcaaagaaagagcttctatacaggaaaagcccttaaacactaatatagtgattgagcccattgctcataaatgtttgctaagaaaaatacttgtctggcgtattcaaaggtcagtctttcctagaggcatgaggaacgtttcagagttccttcggacattgcagtgctgtggctggatgatgccacttacccatctatttatccatttatttattcattaacttcaaacaccttctatagtgcagagaatttctaaataccatatattagaaaatctttattttatgagtttggctgacaagggtaggaataacaacagatattaaaccaaaaagttttgcattactgaaaaaattggacaaattcatattaaaagttcctaaccaaaaatctcacagatatgatgcagtaattgaaatccatcatattctaaggcttaaagcatgatgatctgcttctacagtgataatttgggtaagaaggacagtgttctaaaaaagcagccttaatatataacacggaggagtatatgtattttggtcaccggccatttgtctgtccatccatccatctgtccattcatccatccagctgtacatacatccctacatcctttggtttatttcagtggtgtcaactcattacatggcgttgaatgatgttatcaataatcattggcatgccctttactcccttagggtagaagagaattaggtaaaaggtagtactgaaaaaatgttttcccctcttgctgcaaagttataagcttttgtttcctaatcaggcccactagaccacattttgccagtgagcctccactgaaacaaataatgataatgttcatttcacatctttgacctgggaattgcagagtgatttaccaacattaactcatcaattctcctaacacttctgaacaagacattataatatatcattgaattcatcatgtaaatggattctgtgttttccagagaatttcaatatcctggccaccaattacatagggagtgaggagaaaaattaaaacaaaaattacccttttctgaactactgtcttgtggcctgatctccatcagaatgtcttattttctggaaattttaaaagggggaggtcagaggagacatcagctttgcttatgtaaaactattaaataaaatcatactagagaaaaatcattagaaaatgaccatttcccttaaaccactttcttcatttgactcattgcttaataaaatgatgaacttgaaacgatgctgcctgctccatgtcacccaaatgatgagtcacatcatgtgaacaaatggaaataaatcaccagcgaaaaggccaaacttctgtgctaccctagaaatattttctatttttccagggcttccaatgatcttccattcctgtttaactcagcttatagtaagccctgatgccaagattttctgagttccctgccaaaaccatgatgctctcagcctgggcctctcttctaggagggaagacactgccctccagatgaagtgaaaaggagaatcacaaaaagaggattattccttatgggaggaaatgggacacgtgctgcttattgtaacatcattcgccattcgttgggtatatggaggcttttatgagaaagcagaggtttttataactcatttactctggcaagtgaagcaacactaaaattacttaagtgtttaaaagatagacgcatagtagtttatgttctcagtcatcttattactgagaccctaatttgctttcgttaaactgtcggttctccctgagagtgctattgttatcggagcctcataaccgtgtacacgggtcagtgatggtacaatatttccggaaatttaagtcctccataagtagtcaattgcaggttgttttaaggaacaaagactgcttttccagcaagcctggcttgtgttcctattaaggccccttcttttttattgcaaggggaaatttcaaaatctcattgctgtatttaactttctattttagtaggctgccagtgcacttaaccttccatataaagcttatatgcgtttatgcgttctttcccttattaactttttaaggtttgggatgtcagcctgacctaatgatagaatatgcaaaaatagtcctgataccagcaccctgagcccacctaataagggacctttttcatactgtttacttatttctgagtaacagaaagtctgatggtttggtgctggctggttaaattcaacacatggtaagcttgcctgttagtgaagaaggttgagatttgggctgccggtatgttttcttctttcaggcaaggactgagtggcttccccatgtgtgcctaggtgtccagctgaccacagctgagagggataagcagggattgtgtccagctgagtttgggcccctcactcagtggcctacgttcctcggagggtgtgtgtaattagctgctgagtagtagaaggcagtagccatgatcccagttggaaaatagaagtagagctaaagctaaaaaaaaaaaaaaaaaggaaacaggagagctgattgcaggaggaggaggaggtgggctcttgctattttctagagcctgaaccaaccatgcaaagtagaatagcaggtgttgcagctctttcccccaggaggactcctgagcctcgtaagaaggtcagagagctggttgaatgttggtgcaggaagcacgtcaggaacagcttaacactggtttaattttcatttcccctgtgttattttacacatgaggggagtctgaggctgagcgccgtggagaggtctttgtggggagcagttcacgtcagatccaggcctggtcacctcctggcctcatcccattcacctgagtgacttgtcacccttttcaagtccttttccttctttgctttttgcttctccaagtgtgagattggcaatgtgatcattatatgaaaaacatttaaaattaaaaacgattctgtgcaaatatgaaatagataccagttttctttgatttctgtagtgtcactgatgataatatgcactgtagattaaatgattagtttctgggggtgggggtgctaccactcttttatgtaccaatcatatataaaataagtcctgagttcagaaatgttaaaatgacaaaaatcacatggttgtcatatataagctatgtgtgttgtatacaggctgtttgacacacaggccctgttctttacaaggcatgctttctggaagcccaaaccagtcccaggagtgaaagctggctcctagcaatacatgcgagtaggagtcagtgagggcttaggaaaattatccaggaaattcattttgagcagcccaaactgctagctagtagctaagctagtaggcaggagtttcattgaccacatgtctcaaccacatttaccacatttcttgctaaagatgccctaagtggggctgaaaggcacaagatatatagcaggtgggggcaagggggaagtgaagaacctgggtaccccacaccctagatcattcaattacatttttaagaattttttaaatgtacgtatgttaaaaagtttcagttttgcaaaatgaagagtttggggggtggatggtggtaatggttgtgcatcattgtgaacgtacttaatgccactgactgtatagttaaaaatgtttaagatggtacattttatatttgtgtagtttaccacaatttttagaagtatatatgtaatatatatgtatatttacataaatatttttccctagtttgatgaaagtatattgtcatgtcatccactcacccatccatctttattcattcattcaacaaatatttatgaagccactgttaggtcaacatctgtgttccaagctggaatataactatgaatacattttctgtgcttgtgttactctgaggttagtttaagtgaaagccatatgaacaataattaccagccagcgtggtgagccaaaaatgaatgtgtatgtggagttaagactgtgtccagctgtgcagagttgtggggtgtcttggcatctgtcaaagagaagatggacataaagagatcacctgccaagggacagcatggacaaagcacagggaacaaacagcatggtgcagtgtgtgcagggaacagtcagtactccattggtggtaacttgtcatgaggccaggagcaaaccatagagggtctcataggccatgttaaggagtacagactcctcagctcggtggaggtcagaccacattctccagtagcctgaggatttctcagtctcccaacctctgccctgtgaacctctgtggggctgccttcagaagtacttggtggtgatggatgaggagtaggaggaaccgataaaactagatagtgtaagtagcctcaattttatttatcttgtgtattagatttctatataagattttgtttgaaggcagagttctggcttttaaaaaacacatttgaaaatcattgctgttggcaatgaggaatcataaaaaattattatagttggtgacgattagcttagtgttttaaaaatcaatattctgcattcaaagcaataaaccttctttctccatttctgaacctcacctcacagtactttgcacatactaagcattcaatgaaatgttcagtgggaattgttttagggctatgacttagggatattttcattatactactgtcataagggtccacttaaatagaatgttgcccagtaactcaaaaggaatttgtagaaatataaactatataacttgccttttattctcacttttctttgtgtgcgattggactgtaataattattttttctgagttttcttgtctatttctgagacatcaggttttataatttgatgctttggacctggttgacaattccgattctgtatgtaggattgaactttgtgggaaatagcagttaattgtattttttaatgcttaaaatgatattctgggcaagttttgtttctttacggtctatagccagaatcctactgtttttcaatttgtttaaatgcaacagcttatacagcatatgtacatgttcagttgaagataaaggatatcattatttttagcctattacaaagaaaaccacattttctcttaaatgtcttgatataaagtaatttgaacacaatttctgcacaaatcattttcaagagattggctgtcaagtgtatttttttaagtagcactttcataagaaccaatgaaactttgcaaatttagatagattctaagcctgaaatgtggttgaagatgtcagtttttaaacagcactttgagaagtagttaacttaaaagtatagcaattcagagcatactgagaatgattttgaagagtaaagtcttgatacactgaaaagaaagttgacagattcactacaattaggagacaaggaggtacaactcccacttgtgaaaacttttctcatctaaccaacttctaatacttgcctaagaaaatcttcagcaaatccttactcctttgcagctcctaaatctattgtatagaattcttccagtttcctaatagatgctggcgaggctgtggagaaataggaatgcttttatgctgttgggggactgtaaattagttcaaccattgtggaagacagtgtggcgattcctcaaggatctagaaccagaaataccatttgacccagcaatcccgttactggttatatacccaaaggattataaatcattctgttataaagacacatgcacacatatgtttactgcagcagtatttacaatagtaaagactggaaaccaacccaaatgcccatcaatgatagactggataaagaaaatgtggtaaatatacaccatggaatactatgcagccataaaaaagaatgagctcatgtcctttacagggacatggatgaagctggaagcctcattctcagcaaactaacacaggaacagaaaaccaaacaccgcatgttctcactcatagtaggagttgaataatgagaacacatggacacagggaggggaacatcacacaccagggcctatcggtgagtggggggcaaggggagggagagaattaggacaaatacctaatgcatgaggggcttaaaacctagatgatgggttgataggtgcagcaaaccaccatggcacatgtatacctatgtaacaaacctgcatgttctgcacatgtatcccagaacttaaagtaaaatttaaaaatattttaaaaataaagaattcttccagtttccttatggcataataatggaaacagaataataacatgacaaccctcctttccttgttttaaggaaaagtaagttgttaggcctgtgaacaatggcagaactgaaatggagtcttcactcaagccttgtgtgtgattgtgtgtatgcatgtgtgcatgcgtgcatatgtgcacactcacgcacatgcacaaacctacacatttgagtgcaccagtttaaaataagagaaaaaagtgacatgaaactcacttcccaatttctaccatcattaataatacattttaccaattctgatttgttctactattgtgtcaaggctagttaatgtgccccatgcattggcagacaagatgatattatgtggaaattgtgtcttgtctattataagaacctgaatatttaagtatgggagatttttgcctgatattcttcagtcttgtcactcactactgattaagctttgtaatctatatatgggcattagatgaatccataaatgaatgaattggtagtttcctcaatgttttttttttttttttttttttatcataatgaagatatttcatgaccttttaccagtcttatcacatcttggaaagaattactacatctctgaaaaccctacccaggtaccttcttgtagttgggccatatgtttctcaattcagatatacccttgaggtccactttccttaggtggacatacacttatgtacactcacacacccacatgcatacaatatagagaaagaaaggtaaatagtaaccgacagaggtagtgcctgctattctcttcagcgagttgttatcccctcgtcccattccacaagatgggtgccacattgaagatgcaaccaaattacatgcccacactcacagtggttggcccttttgaaattactgggagattataatgatacagactgtggggttgaaacaattgtattaaaatcaattttctgccacttccaagttctgtgatctagggctgtcgcttaattaatctctcagagtttgtttcctcgtgtgtcatatgggaacaataaacttactttcacacggttgttgagaagagtgaatgataactgatacaagaaattcaagttttgttagttttaatcggacatcataagacttttaaaatcatgtaaatgtacatccctaattgcttgcaagtggtgcaaggtgacaagaggagccacctttgtgggaggagtaggtggcaacctctgatgacttcaggacagtgactctccaccttggctgcatagtagaatcacttggggagctttccaaaattctattgcctgagccataccccagaccagttaagtaaggatctctgtgggtggaacccagacattagtactttctaaatctctctgggtggtcacaatgtgtagccaagttggagaactgatgctttagggggatttaaaagtcttcactccttgcattggctgaattgatgatagccagaattctacaacctacactgtattctttttgcttaagataaacagagtcttaggtatcatgccaaaagtctattatttctcttggttatacacgatttggcatgaattagtttattaagttttctccaaagagccaatcttaatgggtgggtgtcgggcttggaaagagaacagaggtctgtggatatctgaagacaggggctgttcactagaggggcacaaacacagaggcaaatgcaacccaaagtcagcaatttcaagctactgttgcttttgaaaattagttcttgcaaaagcaccacctcaagaggtggttggcttccctgaaagctcagcatcatggctctggtgggtcatcattcatgaaaacttgctgcatctttaaaatgtgggatgaggaaaaacatttaaatagtggctgaatacagtcatagtgtaaccaaaagccagaaaattaatttttaaaataatgtatatttttaaagttttgttttttcaagagaaaagactaaaatcacttcatactcaaaatctctcttacctcttttcaacaattggtgctgagacaatggaaaaagtcacctgggacacatgccagagaaagaagttgaacccttacctcacaccatatacaaaaatgaactaaaaatggatcaataccctaaatgtaggaactgaaactataaaacttttaaatgaaaacaggagtaaatcttcatgaccatggatttggcaatagattcttagatgtgacaccaaaagcacaaacaacaaaagaaaaaaatagatgcattggacttcatcagtatcaaagcctttgtgaaccaaagggcactgtcaagaaagtcaaaagacagcccacagaatgggagaaaatatttgcaagtcagtatctcataagggtctagtttctggaatatataaagaactcttacaattcaaagagaaaaagactaacaacccagtttaaagatggacaaaggcattggatagagatttctccaaagaagatatataaatagccaataagcttatgaaaagatgtccaacatcattagtgtttaggggaatgcaaatcaaaaccacaatgagataccactttattatggtcacccattatgatggccataatttttttaaaaaaggaaaataacaagtgttggcaagcttgtggaaaaaatggtaatcttcctacctggctggtgggaatgtagtatggtgcaatcactatagaaaacaatttggcaagtcctcaaatagctaaatacagaattaacatatgactcagtagttctgctcttaggtatacactgaagagatttgcaaacaggtattcaaacaaaaacatgtacatgaatgttcatagcagcatgattcatagtagcccaaatatggaatcatcccaaatgtccatcaactgacgaataaataacaaaatgtggtatagcctacaatagagtattattgaaccaaaacaagaatgaagtactggtacatgttacaatatgaatgagccttgaaaacattatgccaagagaaagcagccagacacaaaaggccacatattgtatgattcagtttatacacaacatccagaatagacaactccttagagtcagaaagtagattagtctttgccaggggctgagaggagtgggggacagggagtgactgtttcatggataagggggatgatgacaatcttctggaattagatagtgatgatggttgttcaacatgtggatggagtaaaagccactgacttacacactttaaaaacagttaaaatgctgaattttgttttatgtgaattttatcttcattaaaaaatacccctttgaccccatctcttctctaatcctgcacatatagccttaaaccagtcattttaccctttgtgattccattttcatcttattctgttttttcctctaatgttcaacttctgcaaagagacatctacactggtcttcatttcctttccagcccttccattcatcactccagattctacacctgacctggaaaggtctgtgttaactcaaacagaagcttgggcacctcttccttactagaagggcattccagtgattgacattagaaatcaagttcccagcatggccctgccaccaggctggactcgtccattgcactgtcaccaaggaatgttaagtcttggaaacagatggaggaacttgcacggcgtttcccagcaggcacaggcgattcctgcaaacttaggagagtgaaagtcacacgaacaagaatgtaaatttgtgtgagaagacgtgatgctgttactagcagagttaaagtgcttttaactttggataatggatagtctgctctgattgcctcgaaggtggatctccaagcccacagaacggtctaaaagtggaaggaagctgtattaatcatttatttaattttctttctttctctctttttctgctggggtcagcaggaatgggaatcttttttttttttctttttacatcagtcttattatgattatgattatactgaaagacctggatgggaggaatgctgcaatctgaattaaaaatagcattttctgtcctcccacacacaacacttgagtgctctgaatgccttttataaatgcagactttctgcctggctagataaaagaagctgtcacttcatttccataacgaagtcattcccgggagaattccattgttttagcaatagaatttttgtaaaaggcctcttattttgcctgaaaaaggtaacaaaaatgaacttttgagagcttattcgacaaaacaattaagcagtgaagagagattttctccttttttgatatattaggagttgtaagtgtgagaatcccctgagccatgatactaggataaacccctaaatctgcaagatgaaggaggaggggagaaatcctgttattctttctcctaatagaaatggggatatgctcttccccgagaatatgtgtcctagagccaagtgacacatagatgatgctaattctaaagagttttaaatatttagtcttaaagagaggtaggaaacttgtagaatgctcatggtgtaaagaaattccttggggtttttaatgaaacgcgatcatcaggtattttaactgagtttcaggactcttaagacaaaccacggctgcatcttgccagcgtcctttactcataaaatagtagttgatatttttctttatttgcattgaaattgcagcaagtggagtacagggtccttcatgatgcagtgtgacctgtagcgagctcagacaggcctgtggacatgtggtcacactcagcacccctctcctgtgtttccccatccctccacacgatggatctgtgctccaaatatggtatcaaatcttcagcgccacattcatagaaagaaagaataattgtatttcttgttacttacccggccctgcgtaacccacatcaaagtatacctgtctttggtgtttcaacaggtaatccctagatataatgccaagtggcatttctgctacatggtattcacagttaagaccattgaaatcccagttttaagctagaatgcttttatgaagcctcctccaaaaaaagagaagttttcaatagcacctttgtcttgcaatactttgttctgattgagtcagaaaattgtaatatttaaacaaggaggcagttactcggaatagtattaaaaaaggagtttaaagtatggagttgttgtatctgttggcttttaatttagtaaaacaagtagaccaaaaagaaaatgagtgctgttgacgtaatattattatggaaagttctgtgggggcaaacattatgcaaaagtagttaaatctggcactgattttgaatttcagaaaataattctgttgtttttgagctttgaatggcttttactaatataccaataataactttttttttttttttgagagagagagagagagtctcactctgtcacccaggctagagtgcagtggcatgatctcggctcactgcaacctccgcttcctgggttcaagtgattctcctgcctcagcctcgtgagtagctgggactacaggcgcctgccaccatacctggctcatttttgtatttttagtagagacagggtttcaccatgttggccaggctggtcttgaactcctgacctcaaatgatccacctgccttggcctcccaaagtacagggattataggcgtaagccaccacgcctagccccaatactaattttttaaagcatgatttgatgtcccagctgtagccatgcaattttgcatggtagtagttcataaaaagaaaaggaagttgtggctttgataggatgcttccaaggtcgtgtttttaatacttttggtaaattctgttacttgtgtctgttcaaaaggacagaggttgggagatgcatatgtggattctgtctcttcattttatcttcactccccgtttggtactttgtgaagtcaggccaaataaaatagttgaagatactatcatataactctcaatattatggcaaaaagagaatgagaggaaaatatttagctatttcttttttaggatttttactaattgtgttattaaaaaggagcaaatagagcaggaactgaaacagacttaaagtcagaggactggactgcacacattagcatcttgcagaccttagctgctcatgatttataaatgcttcagaaattatcaaagcatgaggcacaggctgtgtttcagccttccccattttcaccaagcacttctgcaacacctaaacactgaccttttcaagcaggcatgaataaaactctcctctgggcagaaggtgcgtgatgactcatggcaaccagaaaggggatgtgtaactcgggatgtggagtctctgggcttctagacccagacctccctgtcttctggcccactgttctttctgttgtgctacagcaatacctgaaggacctgcgtgttgaacaaataaggccaggaataagttgtcaataggagcacatgacatcttgtctttaaaatactaatttcctgagacgtcgttctacagctgctcagcacagattgggtatttatcatctatatgttcaacttacattttattttcattttattcttgatatgcagacatacttttctccaatgtataattatatttcatagcaaactttgcactacgtccataaggagatgtaacctgcatacaaatacacacagcagcagtctctgtatgaataaatccttacctttatgtgataagccatgctaatgataagaagcagtgacatggatcaacatgaaatataatttttttaaaaaacctttgaggatagacatttttccagcatatttatctctgataatgtgttctttaggccggtactaattttggattttattccttgaacacaaaccagttaatatacacagagaatattctgagtgcatgctaggtatccaaggactgccagtttgtaagaaattttacaatggataactcccataaatgatcaaatgttgactgaacagggaacgcatgatattgtgaataaatcatattcttcagaataccttgagttttggcctacctcccacgctgacctccctccaactcttcttgaggtctaactggactctcagtccagccctgcactggagatgcctctcagtccagccctgcactggagatgcctctcagtccagccctgcactggagatgcctctccatgggaaaggggtgtttttggcccagtttgcctgccacttaagctccttggtgggcagggtggagacagggctctgcaccctgctgggctgagtgtgctcattcagaggaagcatttctgaactctgcaattgccagcagccctggcagcttctctttattcctcagaaaggaaatacaaagagttacctttagttctgagttggaaaaagaggctgttgtggaacatttcattgagggactgcacagtttccttagagacttatgtgatgatttttctccaagtcacccaaaagggtgttcttccatttgaacacctgtcctcttccatggaggacagagactcaaagacatataacgtcttcaagtataatgtaatataataccatgttatcaatcagttaatcaacaaatattgatcaaagagttatcatttgcgaaagccccgtgaagcttacaaaaagaagacagacataaaccctacctttacggaagttaccacattccacttggggagatgacacctattgtaggataaggaataaaatggttagtaacataaggaaaatgaattttaaaaccataggcattcacatgcaaaaacaaaacaaccaaaaaaaaaaaaaaaaaaacttctgattgagaaagttgtagaataagaggataaaagagttgtagaaaaagtgggatttgagctggtcttgggaggtctggcttacattttgacacgtggagtagaaatgcgggctctcagagaggaagtgagaagctcactgtggctgcttcagtgtgcatgaggggagaagtagaaatgaagttggaaaagcatgctggggccagattgtgaagatcttcagcatcaaataaagaatttcgaagatgttcagtaagctgtaggaaccaatgaaggtatggatggcacggggaagttgtgttatatctactttaggaagttcgatccaacagggatgactcaaatggtttagagagagaaagcattgacaagaagaccaatgagcaggctgctgtgagaggaattcagtctgagctagcatggggcggtgaagatagaaagggtgcagaattggtaggacttggaaaccgatggaatgtgggagaaagagtagaagatgatgatgctgtcagcttccatcagaaattaaagaggaggagctgggtttggagcaagggactgggaaagtttgaaataaacataatttgtttccactgcatatatccaggagtttgtagggggagataccagggaccaggatacagatttaagaacgataaacagtagaaggaaatcattatagaaagtgaatagaactgagcagatagccttaggaaatctgtcccctagagttagaaagaacagagagagcaaaaaactgcagaggggccataaggagtaatataaggaacccaagaaagtaccatctcagagaaattaagaatatttgtttattttggttacaatagacaaattaaactcaaagtgattcaagcaaaaaaaaaaagaaatgtattgtattatatgtggattggttttctattgctgtatgacaaactacaaatatagtgacttaaacaacacctatttatttttttttgtgtgtgcatcttttctttttttattttttatgttattattattatactttaggttttagggtacatgtgcacaatgtgcaggttagttacatatgtatacatgtgccatgctggtgtgctgcacccattaactcgtcatctagcattaggtatatctcctaatgctatccctccccgctccccccaccccactacagtccccagagtgtgatgttccccttcctgtgtccatgtgttctcattgttcaattcccacctataacaatacctatttattatctcacagtttctggaggtgcgaagtccaggcatggcttagttgaattatctgttggaggtccgaagtccaggcatggcttagctgaattatctgttcagggtttcataagactgaaattgaggtgtcaacagggctgccttattatctggagctcatggtcctttttcaagctcacatggttttttgtatttagtttcttgtggtcgtaggaccaaggtcccgttccattgctggctgtgagctgggggccactctcaggtcctggcattcaccttcagttccttgccatatgacttgcctcctccatcaacatgtcctctctcactttgaatctcattcctggtaaagccccatcccttttagggttctcttaattagatcaggctcaccaagataatctctctattttaaggttggttgactttggacctcacttatatttgcaaaatcccttcacaacagcagaaccttgattactgtcccactgactaactgggaagaggtgtgtgtctggcaggggacatggcaatcttgtgggctacgttagaatttggtctatcataatataactaaaaattccagggatcaggccgggcgccatggctcacacctgtaatcccggcactttgggaggctgaggcaggtggatcacttgaggccaggagttcaagaccagcctgtcttgaacatggccaacatggtgaaaccctgtctctactaaaaataccaaaaattagccgggcgtagtggctggtgcctgcagtcccagctactcaggaggctgagacaggagaattgcttgaacctgggaggcagaggttgcagtgagctgagattgcgccattgcactccagcctgggcaacaagagcgaaaccttgtatcaaaaaaaaaaaaaaaaaaaaaaaataataataataataataattagccaggtgtggtggcatatgcctataatcccagctactcgggaggctgagtcaggagtattgcttgaactcggagtcagaggttgcagtgagtgagaccgtgccactgctctgtctgggtgatggagcaagacttcgtctcaaaaaaaaaaaaaaaaaaaaaaaaatccagggatccgtctaacttctggcatggctaaatccaagggactttactgtcatcaggactcagattttctgtctttcagcttttctctgtactgggaagcttccttctccagtgggctttctgtaagaggtggctaaagaaaccagctgttagtagcatcatgctcccgtggtctcactaggaaagagtgtgttgctcctcttagttccaggtagtctgagagaggcctttgattggcttgccttgggtacatgcctacccctaggccagtcactgtggctggagggttgttgtattacgattgcccagacctgggtcatatgtccatcttccaggccaatgtgtgaagtcatcccagcccagataacagccaaggggagagatcattccagaaaagatgctgttcaggcaaaaatgctagtctactaaataaaaggaaaagaaaatggaaggaactattactagtgaactgtatcagacattgttagagaagttaagaggaggactcagcaaaggtcactgcatttagaaggcaggaaaccattcttgacctttggaggagaaggaaggttactaacacagagaaaagtggtggaaatcaagctccagagttttaagatgtaggcggtgaaatactggcattgaatgtatagtacaactgtttgttggtaaacagaagagagaggacagccatttgggactgtattagggtatggataaattcttttaggaatagcagtgactgagtatgcttggagtgtgagaaatttccagtagagaggaaaaagactgaagggaagttgggagcagagttgaccccagcaggatctggaaccagtaggaggagaatggattcagactccaagtagagaggccacacacagtgtaataacctgggtaatatagtgtgtgaagttttttgttgtttggtttttggtttttttttttttttttggtcatttgtcgcttctttgaaatagacaggtatcattgctttcaatgtagctatcaaatggtgattaaatgtactcaaaagatcctcagcatctctctggccctgtaattgacagaaacatttaaccttagagaagtggttctcaaagtctggtccctggaccagcagtatcagcatcacctgggaacttgtcagaaatacaaattatctgaccccaccccaagcctactgaatcagaaattctacagatgggtcttagcattctctgatttaacaagaccctctagccatttctattcgtttctttcctttttttgagtcggagtcttgttctttcgcccaggctggggtacagtggcgtgatcatagtgcattgcagccttgaactcctgagctcaagccaccttcctgcctcagcctcccaaagtgctgggattacaggtgtgagccactgcacctggccttctccagccatttctgatgctgcttcaagtttgaatatcactgcctcagaggtctgcatctcccctccacatgccatgaaggtttccttaatagtggctttgagaagctatgagagctagtgatgtaagctgctggtgatgaggaaatgggggagtttgtaaatcttgaaaggagatgacaactgttcaaattccactaatgacttaagatgtaatggattggaagaacagaatagaaaggctaagttgtaatttaattttttttgagtttgtggagggctgacacatgatgatgataggcatcatcagactttcaagtccctggaagacagagaaaggtgaaatgggcttaaagcatagctgtagactggtgattcttttggagtaagggttaagtcctagaacaggttttggatatggatcatttaagttaaatccaggctcttccactagatgctgttaggaggttgcaaaagaagggcatggcaaggtttctttcatcagagagcttagaaactttttgagccttcaagacttaaataaatccagtggagtataaaaagacagtataacaaagtgctgaactgaaaaggaccttgggtcagaatgtgtggtagagactgtaagtgctgtgggcagtcaggggaaggagaaattggcattgtgtcattttctcctctaggcagaggatgaaactgacagcctggcgtaatttcccaggtccgatggcaagatattggacaccttggcttcaggaagtgctttttcttgttctctctctcctttctgagtgtgtcaaagttgccaggtcaaagtgaaggtttatactctgagactttgaatgtggaatattgttaatatttttgtttgtataagaagcttgtaggataaattacattttatcttggacattttaaatggaaagagactcaaatagaagtttggcatatttgtttcagacaggctttcagacttactccattcatggggagaacatgaatgagcctgttggatgatgctttaatgttgtaggatgaagaaagcaaactactgattttccttagtggaagaattaagttgagccagatgtgggatgatagggaagaagaaaacacttcagatgaacatgacatttccactgcttttaatttctttgcaccttgcttgcggctcatgtgggtaagtaaacagaccactgaaccaagaaccaagagagaaggttgacggaacactgttaacggtgggcataaaagctgtttaagtccaagagagaaatagtaaaaataccgtaatcatcaaggggaagccagaaatctggtacctgatccaaggtcctaaagatgtttttcagaagtctacaagtaatgtgatctgttttcagtcctttttgggggagggttttcttaacttcagctgtggcatgcaggtgtcaacaagagagcttccttttacttcactgtgataacggagtgacttggggtgcattagagagcagggtcattatttgctgtcacatcaagaataatacctgcatcaggggtgttcctctcaccgaaattaatcacagagaaggtgtgtgttgctctgatggcctagcagtcagaaagatgaatcatctcttatttcaaggtatggagaacagttgtgtcactcatttctttttcaaggagactcagttgaaatggcaaaataaaaaagagagaaataacagaacacagttgtacatcactagatcagttcgtataatacagactgtttcctctacctggaaacctgatgcctggctaacttctgctcatttttgactttcctgttcgaatgttagttttgtaagagaagccttcctgagaccctccttctaagtgaggtacccccatcatgactacaaatcacaatgttcatttttccttcatattgcctatccagttttcaaattttatgcatctcctaaaactcatataattatttaattctgtccctcttgaggcagtgagctccttgggtgcagggtcctgggctattttgtttaccatgtattccccagttgaacacagagcctggtggatttagcaagtaccaagtaaaattgtatcaagcgaatgatttaattaatgagaaagcacttggtaaactgtattcattatgaaagtgatggttaattatgtgagtagcagacacctcctttctctcttctgtcccaattttgtctctccattttttattagttctttattttgagatatacttgtcagtgtgttaccaattccaaatctaagatttgttattattcattcttgcctttttttagagataaaggaccactcttttttgttttttttcctcagaaatgctattaatgacacccacaatgctaatactacaactgttttttctgtgcatgctcatgatttgaaaggaaaaacatgactggcctttgtcgatgatgtatttgggaagcaacaagattctagtgtagcacttaaattctgtttcttgtcatcctcaaagctgctaatacaagttcctttgcctcaagtgtgcttctcaaaagtatacaaggcgaaataagttgatagtatcgttccaggagaagctgttcctgggtcagccttgaaagggggaaaaaaatcaagaaatccaggtgtggaaaatattaatgatcaggatatgaataagtcttttcattaaaagcaacagcaaataaacaaaaagttatccaatccttttccagcagggcctcgctgtgccactctggtgggtgtaagtgttgtcttcggtgggcggaaatggcagacagccaagtggaaaatttcacagtgtcgcaaacattcagtgcacgaaacgctgcaaaccagcaatctgagggagccgtgtaccaaataaccacgctcctgcatgtgccctactgcccaccttacactctttctcctagcttcctgcgtgatgccttcactttctttttcccggagattccagattcttcgtttctgttcctattctttcctgaaactcagcacagtagggcatgcagacgtttggatgctcccgggatagttgatgattggtgccttaccagtgctggcttttgtattctggctccagagctcaggaacaggcttatgaccaccaacaacgctttgcattaacatagtggatttcttctcgggaactgtgtgtgctttgcaagaatgatcttcttgatcttctccatgacccagtaagatatgacagtggcagaaggtgctagtccttgcctccttttgcagaagagtaaagccaagtggcctgttttgaggcttttgcaagtttgcatctcagctaagattgtgtctgaagtctcccagaaatggcttcaactttggggtgaggagaggctggctgtaccatgttgtgttctttttgggaaaagagcaagaacattgaacttcttttttaagaaaatggtctttggtgaactatcaattcgtctaattggtcgtgagactgtatttgttcagataacaagtgatttgatgatgtgtttacctttttctttttcttctgttctatttccatgctaggtatttctcacttctctgtgaaaggaagaaagaacacgcctgagcccaagagccctcaggagccctccagagcctgtgggaagtctccatggtgaagtataggctgaggctacctgtgaacagtacgcagtgaatgttgtaagttaacaaccaagaacaatatgtgtagtggcttgccttgtaggattcatgaatcacttgatgtaaccgagccaggtgttgaaggggtattagcatgagctctaggtgatcgtccaattaatttctttttttaattggaagggaatttaattttttaagggaagaggtcctgtttgtatttgctggaacttgcctttctctcggcttctatggcatgctgcaaactatctacttcaggaataaaaggatggaatacagtgattctttcattgtaggaacaccttttctactggtacagtcaaatagtatcagatttagagcagcccctttaaactgggctgttgcagttcttttaggttggtgagtagggggtaaaattctccaggctaaggattagcaatcagagtttccatccagcaattattcttctgtatgtgcagttgatgaaaatgacatttttctctctggcttgtaaaatcttgaggtatgcaagttacaagcagttatgtttggtgcttcccttacttaaaatgagctgatttactggttttgatcagttactggcttgggattttgagattagtaaagtttgttcccacatgtcacctgatggccgccttgcatgagaagttttagtgtcaggtaatggaagagatgacatagtgtgacttcagggagcccttccactaggaaataatgcaaaggtgctcagccctcctactttctagagaatttaccttgttgctggactgtgtcacaaaacacagttaggagattttgaccaggaaagaaaatagctacatgaaacccaggatggcctatgaatacctctgaggacgagaagatattatcttcaaattttaggaaatgacaagccaatttcttctaggtttttgttgttgtttttgtgtatatataaatacatatatttctgtaatatatatgtatactcttgtttatgtatgtgtgtgcgtgtacacacacacacacacacacacacacacacacacacacacacacatatatatttaggtttccagcttcttaactcagccagaaaacttttttgaacatgtattacctattttttttgcagttgcctacaagatttgtaaagagcaaagtgtagcatatatcagggagaaaagtattgacaaggaaaaaaaatgttcctaatttttttggtttcatagatttctaaacatttgtattaaaatatgcatatgtatccatatcatctcctcagggttaaataatcagtaatattaatatgagcttattaaattcaaattttcccagtgcttcattgaaagcagacagtgggagacactgaagcttcattgtgtttccattctgtacacgttgggtctagtggaaatcagtcagcctggaatcagctgacctgaatcctattcctactgttgagatcaagtacactggcaaccttgggcaagtcgcgagcccccataaaacaatattttgcaagtctgtgtattgcttcatactaccttattttcatttttttctttttaattgaggtggtgccttactctgtcacccaggctggagtgcaatggcaagatctcgattcactgcaacctctgcctcccaagctcaagtgaccctcccacctcagccttcagagtagctgggaccacaggtgcacaccaccatgcctggctaattttttgtatttttggtagagacagagtttcaccatgttgctcaggctggtcttgaactactgagctcaagtgatcctcccgcctctgcttcccaaaatgttttgattacaggcatgagccaccatccccagcccatactacctttttattaagcaatcagcatcttggtttagggtcctcataaggggaagagcattgtgaaagcactattttacttatttttttaaaaaaaaccttattgtaaaagtttctgtcactatcaaggaataattgtgggccatgttagatttgggtactccagttacagtgtgttttactagaaatcattttcccaatcaggtaactgttagaatgcacttctggtggtattttttaaagcatttttatcctaggaaacaagtgtcttatgtaaaactgctttaggtttcaggctctatttaaataactcatgcagttaccataatcaagatagcttttgtttcaaatctagtgggggttttttgttgttgttttaaccgttgctttgaactgttcatgtgacaccctgtcagacctcaaagattgagtgaggttttcaaaggacttctgaagtgtacactttaagatgccacatggcagacttgaagtaattttaaaatccttctgtaaatggagtgtgttgagagagcaaggaaataccaaattctagtgaactctttgtgcatgctaagtactttcttttcaaaaccgcatttgcttggtaggggcagtggggggttcctagttttcttagtaaactgtgatgttggtaacctttcattatctgggcacatgtttacaacactggttttctgtcttcctgggtttagtgtcctgcatgccccaaagcctgtgccatggagaactgttgcagtagagaaggcaggcaattttcaaagaatgcatgtttgcacataaacagggtctaggagtgggtgtataaatgtgtgagtgataatcacagcagccattggaagtagtggttcccatgctcagcagtccttgcagatgttactcctggcattcattcctgtgcatgtcccattaactgcctctcaaatctgccaccacttgccagcagatggcctttgcccctgaagatgtttcagactggctgtaagggctggggggaggggggatcttgtacaagaagagaatgatgctgacactgaactcagagttagcagacctggattttatgcacaatgctgttgttagccatataaccttgggtcctctctaccatggggactcattttatgatggacaacttgagaaaattgagttaaatcacctccagtggtggtttttaccctaagtgtctcaagttgcataaagtatcagccttagatgaggccaattgaacgtttattttaccttcttgggttcctaaaaatcaatgatttggcactacctcatttacaactgtttttaaaacattgagcacagtcttagggttaaaagaaaaaaagagttattacatctttcactaccatgaaaccctttccacaagaccctcctgggcaccatatgacaattcaaaggtatttatttgagactgtccttagactatagctttagctgtttaaatttagggtccacactcattggtccttttgaaaataaacaggaacgatttttgaacttgagttttctaaaaccacctctgtgctcaaatattggttagagtctaagcaaggagaaagtgatccatatttcattcctaagcttctctgcttccttaagtaggaattcttgagttaccttatcaaagcagccttccctgatctacataaaatagcatccaccccatccctctcagtcctctagccttctgtgtttttcttttaagcaccttacatattatatatttatttgttaatcatcagtctcctcaactagtctgcaagctctgcaaaaggagggatggtattcttatccttattctcattcttattcttccctggtgaatgaatagtacctaaaatactgcttgttcccataatgggcagtcagtaaatattcattgagtgaatgcctaaatgacattcactaagtgaatgcctctcatgtgtgggcctgagccattaggaaaaggaacatacatgctgttctgatgagaatgcttgaatctgatagcagtttaagggtgtggggaagggatggagagtctagactattttccttagaagtggatacttgatgtgtataaagaaatgtgaggagggaacaatttgtgtaaaaaaaaaaaaattctagacctatcagtagagtttggggattttctaatactttttttaaaagtctgcactgtctgtatttcctctccttttccatttgagtggtttgctttgtcacttgtttgtgagcatcctgccctggctttctgtgaacggcggtggttttgtctcttatcatcacatcatttcatcactgcttacgttcatatttcttttcaaagtagggatgggcctgaagtgctgtatctccctagaaaggggctgactgaataacacttcattctagtgcacaccttagaatgaaaaaatggtgtgctggtacaaatgaaacccatttaatgtctctgtggtgtgtgatgggaagttcacaaaagctttcttagggaggcattgtgctagttagcttttgaggacagcaataataaaggtttctggaattttgtgtgtctatggactcccttttcagaataactgctctgagtgcaggcattactttattcctaggaagaaatggagagactaaaataaatacctctgtacctgtgtaaacagcattatgctgtctgtgtaagtcttaaaaaatgggagctgaatttctcttactctgaatctccagactaagagaattgcacacacacgcacactctaataagagcaatctgggaatttccctctgtgtctgtcagtttgtaccttttagatttgccatctgtgataccaaattctccagcgttacaaaaaaaaaatctgaagtagataagagggtcaggagagaaggggagattccaccacttttggacaagtgagggagaacaatctcctttttcttaaatccttgcttgtaatgctcctgcagattgacctacagattgtaaaggcagagaggttatgactgagctcattccatccaagtgcactggggatagcttcaagtcttctagagttttctctttcacccatttctctctcttcctcagacttccttgaatggcttctgattgacagcttcactagttcctggccattgcccctggtgtgttatttgggatgggcacctttggcagggtctttgcaggagtcactgcttctaagaagtggtgtcagagctacctcctgaggcaactgacaaagcgtagcccatcccaggcacaccctttcccctcagcaccttcttcctcaagtactcagctcctcctctcagcatcttggagaggaggaggaaaatgcaaagaacacccagacgttgtggaaggaaaaaagttcatggatcttttacaacatttgtgttctatggggtgaaacaacatcaacagcctggtcaggctgctttgtaactgaatagtgccaaggtaaaatgcttttgtgtcctctttaagtttagagttcactcaattacatgatatttattaaaagagtgttgtgtgccaggatgttcttgagtctatcagggatccagggctgagtaatctgtacttactgccctttgagactctaggaaggtgctatgggaaggatgtacttggtggcggagtcaggtgtaccgaaagggacgatgggtaagagttgtcagcgctggaatttcagggaagacatctaaattgagccttcaagcagaggtggaatttcaacccaatatatatgtgtatttagagaagacaaaggatgctttgagaagagactaggaatagtattttatgtactacttctgtgtctgggcatgtgagagctcagagccagagctttccttccatcagaaattgtttggtttgaacactgacaaaaacatagcatgaggatttgtagcacatggccaccaggccaccattttcttcaggatcattttagatatttttttttttttttttttttttgcagatgaagtctcttgctgtgttgcccaggctggagggcagtggcacgatcttaactcactgcaacctccaccttctgggttcaagcgattctcctgcctcagcctcccaagtagctgggattacaggtgtgcctcacaatgcccggctaatttttgtattttttgtagagacaaggtttcaccatgttggccaggctgatctcaaactcttgagctcaagtgatctgcccacctcggcttcccaaaatgctgggattataggcatcagccactacgcctggcacattttggatctttatatgtaaaagttgaagcaagaacttgggatgcctaaagaatgatgcctcccagcattagtaagggcagtgtttccaactgaactttgtacagaaaaacccaaacaaaactaaagatgtattttttaggtggtataaattcgaagtgctcaatgttcaagaatccacaataaagaagggcagggatgactgaatagtgataagaactagttgacattgtttagtcatagaacccaaacaaaatctattggttcttaacaacacataaattactccttaggactaatgtaaacagacaaatagaaaggtaacttcattttttaattatctaaatttttcacttttgtaaaagaatcatattataccataaaaatattaaccatgtctccaacttaaattcatgttaaatttccagtggtagctatgtaataaattattgctaagtagaattgtagactgaaagaattaatccatcttctataaatcctgaagattatgttaaccttttccagacacctaaacaagtatgttacatgattcagaaaaagtcatttttgacaagtataaaatgattttgaggtgtgatagcaaattagctgtttcaaacctatgttagagaaattaagttttcagagcaatttttttttgtatttgtgcttatattcctgaaacaacttgcttaaggagagtctccttaaatggaaacataaatggtatacaaatggctatcctctatcataatcttttatttccaaaactcagacaggtttttatcatcatgctctttggactcttaaccatcttcttctacttttaaattctacttctttctcaatacatttttaaacagcatcttgtgatcatttcccagtcttgagtgcctggcactgggaggtgacctgcccacattgctgtcagaattcgctgctggacccctgcacaggtcccaggctgttggttacgtgtttcaatctgcacatcagccatcctcaccagccttcctttgtgcatctggaaataaaaatgctcttgataaaatggttttctaaagtttccattaggttgctcttcatttcatttttcctttcttcttcccaagcctttgtggcttgcatagaattgaaaaaaaaaatgtaatttctccagggctaaaatccaagactttgataggcagtcttaatgcatggggctcctacgagttgctacccgttataagcattgtaaaactcaccctgcagaacaaagagaactgggcacaaagattattctcttcttcaaccatggcaagccctagttttccggtttcctttgccttttccttctttgatctctaaaagaaggtagaagagtagaacgctattgttcagaaaggagaaagctattgcttgtccaaacagattgttttttccttctgtttggcaacctcaatggctctacctgtttctggctgtcatacttcggcttgtgaacagccttcctccctaattttcaggaaactaacaaattaaaggtgcaaatgtcaggtggttactacatatctactggctcacataattcaaaacagagtcatgcagctcctatctaaagctagttccttgccccttctcagtcactaccacatcaagcacaaatgtagatgaaagggtagtgtgtcaaggtgagagctgcccactgggtagtgttactcggtcacttgctataggggacagattagctgccaatcagtatctcatcactgtcattggcgtttataatccaggttcctagccccactggtgatctatttctgtgcctccgcagtgacgccagttgtcctagcaacgtgctggctggcacttcgttaaaggcaagtaagggagtggtggtggaagagggtggcctcgagagggtcagaagggagttggcagtcaccttgctcaaagaggattttccatttccctcatctgggcaggcctccaggaggaaaacgtcacttactaagtgtatcatgggagtgtcacttactaaggatcatggaccacatggtctttctggtacagatagaatcccacggagaataacaaatgaattaatgggtagtccaggcagaatgtggggactgccgggccaagatgttaggcgatctcaaagcatctgatggtatcagtttttcttgtgaattaggttaatgttttgcttgtttatcagcactggcatgcagagttggagacatgagtagatgtttgggaggaatcagaggtcaagggaggcagaaggaagggaaacaccatgacagtccctcttggccccttttcctgttgacaggtctggcctgaaagccatccagtgtaacgagagccttcttactgagctctggtaatttatccatgcacccagccttgaagaggaatatggctcactttgtaatcttcttaattgctctcctctcattatgccacattgaattggcactaaatgactttttctgccattttccgatttggatccaaagaacatagaaatactgtggattgtatcttaaagtccctgtccaaagtggccttgcctagatgaaatctaaaatggacagtcaagtgacattggcagagctgggggcttccctccatggccacttctctgtggaagcccctaggcaatgggtttgggtgacattttctcctgagagtgcttcgtctgtgtggccctggagatgccaagacatttttcacgaagaaagagactcaaggtgggtctttgcaaggaaatggggaacaagggagactgatgaaagggtgtccccagagcattgaagacccacagatgacaggaagtatgacgtatgcattgttgcctttcccttcacgactaaaagagtttttgtagtctcaatgaccgttgtcatttgttccactgaatgaccacactcaagtcgagataattgcatgaaactgtgtgcttatgatgggaaagacatttagggtgtaactgaccatttctagcacgttttgtatactcaacagaaggtatattcactccttctaccatagctgaaataagggctggtagtgaagatctgggactggaattgaaagaaataatttttggaaaaagaaaaactccaagggtagctgttggcactttcagagcatcccatattttcaggatgttttgtatgagataaagtaaatcagttttgtttgacagggtgtagtgtgcccagccaggtcattattttaaattgacaaaatgatttaaatgatagaagacattgtatattcctgaaacaataaatacctattaagtacattttgatacagtggagaagtacagtttttgttttttgtttttttttttggattattatataactgttaattcaacacttagtgtttaaatactcatcattctttatagtgcacaggtcataaagatagttctctcatatgaataagaaatacaactaatgtgaatggcattaaagttagaagcttcaaattcttctctgggtttgatggttgcttttttagaagaaatttggtaaagtagatgatagaccagttaggtttcatgaacttcgtgcttcatattcttttcttttcacaacctagctagatacacagtaaataactggaagcatactagagtagaaagaacccttcttcctgaataagttgtcgttgatcacaggggtaggcgttaatcaaaatattaatgactaggccaggcacagtaattccagcactttgggaagccaaggcgggtggatcacctgaggtcaggagttcaagaccagcctggccaacatggtgaaaccttatctctactaaaaatatatataaaattagctgggcatggtggtgcatgcctgtagtcccagctactcgggaggctgaggcaggagaatcacttggacccgggaggtggaggttgcagtgagccaagatcatgccactgcactccagtctgggtaacagagtgagactccatctcaaaaaaaaaaaaaaaagtaatgactaaggagaagatagggacaccttgggctctgtccagtagcaggaacctcaggctaagaagggacacctgggttctcttcccatccctgcccttttagaccagtggcaagctactctctatctgggtgcctctatttccttatcttccaaaggaagatcattatcactgccacttaacagcatcagatttaaagtattagttcatataagagactctttgaatcacatttgggttcagatttcagacctgccacccagtagctgtgtgtcctttgggaaattgcccaacttctctgagccttatttacttcatctataaagaaggtctgaccacacctaccctgatgacctgttaagagagttaaatgcgataaagtctgttaagtttttagcccagtgattgctccctaataactgtggcagccatgatgctgttatgataaatttcacacaacaaaatctatcatgatgcgttgctgaagtgaacaggtgagcagttgcaacttgctcatctctttgttgtagagacatttctgctataataggagttgtcattaactgtcattgtcattacactgacagtgaattcggttatgtattgttaagaccttctgcttccttgacatgtatatagtagaataattatgacagtgaaggtgacacatttgtcagaattatccatgtgcatatgctgagggcccttggaattttaggtgaattttatagtattagtcaaactgaaaggcacagtgagtttggaaactataatagtctcatctataaaaggagtagggagattcccaaaggctgttgatatgagtagaactctgaaaaagtaaaacattaaaatacattttgatgtggttaccgtgtctaggtggtgataggtaaaaacagtctagtctaattctttgaaatttaggatagaagaaagcctgaagatggatatctacattcttgtatcttctttcagcaaatatttacagaaagagagagagagtgtgtgtgtgtgtgtgtgtgtgtgtgtgtatgcacacacatatgctacaggctaggcacctacagtagttaaaggagctttcagtcactggggaaagaaatgagaaaacaggcaattcctttacaccatgaccagctctctcctaatggtacccacaggttgccatggatgcagaccagcatggcatcttctgggatcagggaagctttcatcctcagacttgaatgaggagtagatgttaaccagaaaacaaagtggatgtatcagttagcatatactgtgtaacaagccatcccaacagttaagggccaagaccacaatcttatgattgtgggtcacctggactattttagtctgggccagcttggctgggactggttaatccagcatggtctcactcacatagctactagaaggctggtttgcctgagagatgggtgatcttcagctgggacagcttgtctctgcttcaggtggcctctcatcctccagtagactagtctgagcttcttcactttgcaggctaagggttcccaaaagcagcaagaaagggcaagccccagtgcatgagtgcttttcaagctctgcttcaagatgcttgctaatttccctttaaccaaagcaaattacttaatttgttcagttcaaaggatggggaaactccagctctagtcacatgaggacaacatgagcaaagctcaaaggtaagagagaacatggcatgttggaagacagcaagtagtttggagtggctggagtcaggcatatgtgaagtctcatgaagaaaaagccagatcataaagtgtcttttcagtaagttctgctgaggagtttagagtttatcttgaagacaggggagtggtcattgaaagagtttaagcaggatgttgacatgatcaatgagatgtgtagagacatggttaggtggtagaagcctaaaaacactcgttagcctagacaattcaggaagtttccaaagagatgacccagggatagcataggagaagatggaaggacttgactgagaggtggctcaaagctgacgtgtactttcagaacaatgtgaccagaaaagaggttggaggcccttcaaggtagagcagaaaagacagaggctcaggtcatcagcaatatccgtatgaatctggtgggagaactccaccagtgttcctcacctcgctcctttgtgggatcctgccagactccaatgtccttgggttctaaataaacacctaccaaggggctgagtcaaagagattccagtctctggaagtgtcttcttgtcattgtcatcacccagccaaagactcttttccttccaacatgtttttccctttgacctcaaaataaacaatgtgttctaaaggctctggggcactctcaaaatgcttctctgacctcggataggaccatgcttacccattaatttccagatctgaccttttcactacacctttaagcataactctttcaaaaggcaaaaatagaaatgactgtttcatttcaccaaattcaagtcgccaagagtgagaacgtgtggttttcaccggtacgtttggggaccagtttgttgtcactgaaactgcctgatatcgggtcggagtggctgggtatttttcagtccttggggttataactcaaatgttggaagtggtatcttttataggtaaaattgagggaggggagcatcaaaatgtgtgcgatgcagataataatttgccaagttttctaatttttttcattaaaaaagaacatacagaagagtctacaagtagggcaggcagccttcattcctatgctcttttccttgagggacaccttccctaaccaaataattgaaaataaatgggaattgtgggaacagaggaagacaagaaggaaaactaaaaacccaggacctaatcttccaggggcaggcaggccacttttgtagctcagattctgaccttttctccaatcaaagagttcgaacagactgactgattggagtgctctgtcagcattaaactcaatgcagggttctgctctggcacctttaggggtggtggtttagaccctctgcgtgccatgtcttatcaccagcactgctaactgaatgggatgcattttcaaagacaggagagggtttgaaaaaccccagggcatgctcggagcctgcaggcatttgtttgctgctgagaaccatggcaagcatttttgacatttttatcagagtcttagttaaacaattatgtggaggactgataaagaagtgtgtgataggagacttcataatttaaagtgcccaaatttggtgagctttatactcatgtgaaatggaaatgaaaacatggcatgttttggaattcctgattctgcttatttgctttaatagcagatcattgcataaacactgactcattgcattctatactgaaaggaagatatggtttgctgtgttcaatctggtctggcttccagaacacagtatagaacaagtgccagaagaagggatgagctcagctttataggtgactggagagatacccaattccatgttttgtgctgtacaaacacatgaccttacatgaagttttgcataaaatattgaaacaatacatttctctttataaatatgtatgtaatctgttctagagtgtatggagtagacagtaaaaaaaaatagaatcttcttatttttggaagtggggtgaagacgcaggtgtgcatatgctgccacctgcgtgttatttcactgagttttgtcaggttcttttcttactcatctgcactttgtatgttaccttaagcgctgtaaccattctaagctgccagggacatgggtatgcaatcaaagtcaacactgtgattaaaaccacctcctgttgtttacctttttagaaattttaataatacagtcaagtctgaaagagcagaacttttctcaaagctacacacttggttgcctcttcttgattaatgcatgggggtggtcactgtaacctaaggtctgacagatggtgcggagattgatgaagttaaggcctgttaggtattccgagtgtcttataaagaaaaataggctaccttaattcaaattgttgttgctcttccaaccttctcttatgtaaactccctgtatattacaatgacagactctctctctttctgtctcacacacacacacacacacacacgcatgcatgcacacatacgcacactcctgacatgctctactgaaagctgcccagctacagagaggtgcgaatctaatccagggcacatggctgctttgcatttcactggctgtctagtgtcactctatgatataggcataaggtcatgactgtgagctatcattgtcacttatcttaatattaaaacccctctgatccaatctgtctgccttatctattacatcattcacatatctagattcttcaaacttaactactcattgcagcaaactcaggaatgccgagctctaaggcatctccatttacttcgttcatctcaatctcaaattactaaccatagttcagtttcaggatgacactgaaaattcaaaattacttcctgtgattaacttacattgtgatggttgggaattatttcgcagaagacctgttcatcttctgatgaagcccttttcaagttttgaattgtgtgtgtgtgtgtgtgtgtgtgtgtgtgttttaattgccagaagtctttcagatagcagggagattattggaatgagaaagcaaagcttgtatgaaaacttgtggcaaaaggtcatctgtgctgtgggggaaatttcaaagtaggcgcagtttgtttccagtggttcctgcctgtcctttcagtggctggtcactctctgttccctttccagacgaatctttcccctcttccaaatgcctcacatcagtctaggtaccttggttggcctgtggagaaaaacagtcttgttgagacactcacattaagctgatagagaccttggctaggataattgcatttttcaaaggctaagggttggaaggatttaatttttctcttaattattttttatagagatgaagtctcactatgttgcccaggctggactcacactccctggcctcaagtgatcctcctgtcttgacctcccaaagtgctgaaattacaagcatggcctgaatttttttaatggtgatttcagctgatcccaggggagatcttttgggtgtcatttttcaaacagattaggaagcaagcagctgtctacctaatcagtctaaactacccattctgacttctgtccaataactttccatataaaatagctaacataataataatcagataactttgcatgtaagtttcaaagctatggtatagttcaccaacataattttccagttttttttattatagtaaagtacacataacataaaatttactgtcttagccatttttaagtgtatagttgtacattcatattgatgtgaagccatctccattgtcttgtcttcacacctctttttttctggcaaaactgaatctagacccataaaatactaatgctctaccctccaccctagcccccggcagccaccattctacttgctgtctattattttgactactgtaagtggctcatataagtggaatcatgtagtatttgtccttttgtgcctggctcatttcactgagcataatgtccttcaggtctgtctgtgctatagcatgtcagaatttccttcctttttagactgaataatattctgttgtatgtgtagaccacatttagcttatccttcatctatcagtgggcacttgggttgcttccacctttagtttattgttaataatgctgctatggatatgagtgtgcaaatatctctttgaaactctttgaaaccattcatcaactctctctttttcttttttttttttttgagacagagttttgctcttgttgcccaggctggagtgcagtggtgtgatctcggctcaaaacctctgcctcccaggttcaagcaattctgttgcctcagcctcccaagtagctgggattacaggtgcccgccaccacaccaggctaattttgtatttttagtagggtcagggttttgccatgttggtcaggctggtctcaaattcctgacctcaggtgatctgcctgcctcggcctcccaaagcactgggattacaggcatgagccaccgcacccagtcttcaccaactctctttcacgtctttattagatacaagtgtttgaagaagccttgcatctacccactttgaaccttttttcatgatagaactgtaggtagactttctgcctagtagtgttatttgaagcatcctttctgctgacctctttcctgaggcctgaaatgctactaatagtagttcagtcctcaagtatcaagcaaagccatcagctagttttctattaaaatgcaaatgatcctggggcagaggccacagataagatattagcaccttggtgtgaatttgtttaattagatcctatcttagaagctttctttaaccccttgcctagttcttcactaattgctccctgataaggtcttgcattattactgcaagtatcacactgtattaaacttatttatatttttgcttctcctgatagaatagaagcttcttaagggcaagactcttgtataattgctgttggtttttcaggccctaatagaatgtcacagacaactttcaataagctactcactcattctttcatgcattcattcattcatttcactcatttattcatcaagcatttattgggtgcccacggtgtaagtgcattttaaaactctgcctttctagaaggtttggacagccaagggccagctctgttgcacagttttggcagattttagaaaccttaaaatctaacttcctgtatttttaggtgcagggacttggtccagatgagtggatcaacctctgaaatagttttctatcacagtcctaccttttttttttttctgcttctattcagaagaagcatcgatctaagtaagtttgtgttctgttcaaaagtaaggtgatgtttcaatgtatattctcaagcatctgaaaacttctctagttgctctaaatctcaatatttccaatatcagccatgtacagtttttaaatgcttgcattctcttaggacattgttaacaatctgcttagaaaggggagtgacttttgcctcttttggctaatttgctttgcattgatttgtaactgtgtacttcagtatataccagcaactcctagcccagggatagcatatactcgcttactggttccagtgactgttcattcatcccacagtggcttccctggaaacaagttactctgataacaatttgatggtacttccctttataaggtaataaccagtccgggccaggcatggtggctcacgcctgtaatcccagcactttaggaggccgaggcgggcagatcacgatgtcaggaaatcaagaccatcctgactaacacagtgaaaccccgtctctactaaaaatacaaaaaccaaattagccacgcgtggtggcatgcgcctgtagtcccagctactcaggaggctgaggcgggagaatggcgtgaacctgggaagtggagcttgcagtgagccaagatcgtgccactgcactccagcctgggcgacagagtgagactccgtctcaaaataaaataaaataaaaataaaaataataataaaaaccagtcctaaaccaaattcttactttagtctctagcctcagagtttattagttcttagtaatgttactatgaaggcaaataggagacaaattattattctggtttttattgttactgccactgcaattcctatgattattgctataattccctatttaataggtaaacaagttacaacatattcgatggtcactagatagaaatagaaatggaatgtctttaccaagagaatatccgtgttttacagagaacaggaaacaagtactaaatggaatcttcagacaatcttttggtcttcttgtaggcagtggttcagcttttttacctactaaaattttggacagggttgttaacaggcaatacagtttaaaatgaactgttttaagttttcctttctgactttttcatactcctacattaatgcaataggattgaaggctacaacaatgataattgcaatatgctgaaataatgaactacagtaaatagctatagtgaatgtatgcccatagaaaagaatggaaaacaaatggcttttgattaaaggtacttattgtaacagatttcaaggtgaaattgttagttcagaaaagatggtagatagagtctttaaaaatactgtcactgggatgcgtgttcttctataatgctccctccatcccccacccgaagaaacacacactcctccctcctctgcatgtaaagcagtagttttgacaaataaaaccaaacagtaaaacctgacactggtgattggaccgtgcgtccctctggtttgtggatgaggagcatatctccgtgatagaataaccacgcttcatgctaactcccggccacatcgctgcatcctcttcatacataatttgcatcatggggtgtttctgcatatgttgtgcattttgatgttatttttagctacaatttttaaaacaataacatttttttaaatagactaatcaagaaagcgcctccagagtcaagaaaacaagtgctggggatgtgtgggtgggggtctgtctccccgcccagggcatttccctttgctgctgttgttactactccttccattactttttgtgactttagctttttgaaatttccattcctttgttttcccttgtgcatcaggatgtggctgttgaagtcatttatgttatgcgaggctgcaccacagtcatttaatgcaaacactggcttttgtgtaaggcactgactattctaccctcagcgaggaagacgttattggaaacttgagttatgagatggaaagaacattaatcctttcattgaaaacattagtcttttacatggattctctgtaatagcttgaagagaaattaaggaaatacaaactagtaatattaaaaatctgccatgtcattattatctacctgcccatagatgttcaccaccgttagcatttgagtgtgttttcttccagaagattttctatggatatatatatatacaaataaatacatgtagctttacagaaatagaatcgtgcttgatctacttttccgaaatttcttctctcacattgcaaaagttgtgaatgtctttccatctgaattattacagattttcaaaatatttttctggctactgacttttccagtatatgaatgtaagagtgaaagttcttcgatttcaccagttggatatgcccccttttctcttttctgccaatatcaattgtactgccctcttgcgctatcctaaatatgatcagatgagaattctgaaagagaagaaatctaggaaccctacttgatagagagttatcctcttgggttccctcctgacatttaggcctttttttttttttttttttttttttttttttttgagatggggtctgactctgtcacccagactggagtgcagtggcgcaatctcggctcactgcaatctctgcccccgcctgggtacaagcgattctcctgcctcagcctccctagtagctgggattacaggcacctgccactgcgcccagctaatttttgtatttttagtagagatggggtttcactgtgttagccaggatgttctcgatctcctgaccttgtggtccacccgccttggcctcccaaagtgctgggattacaggcatgagccaccgcgcctggccacatttagtacttttaagaagttattcctcttccatctcagcttcctggacacagttcgctatgacttttcttggaaattatgcattcccttagaatccttgtattttctgtttactttccctcaaagcaaggactcatgacctcacctgtagtgggcctccccatctctcatgtctttatgtggcccggacttagcagagacacctcttggtacatcattttgattgcatcatgagctttcccagagtctggagtgactctgtctttcagatttcattttaacctcctaatcacaggctatctttgatgcacctatctttacctccagttcttctgctaaagaactggaggcttgtggctcttgtcttccggtcaaacatgatgctctgctgactactcttccccatgcattcatcccaccccagaccctgcccttgccctcatccccatctgaatcattgcatcctcctagttcttggccaaaaaactggctctcctctagcccttcaaaccttgcctgggagtcatctttatggcaccttccctgattttttgttttgttttgttttgtttttggaaatggaatttcactcttgtcacccaggctggagtgcagtggcacgatcttggctcacggcaacctccgtctcctgggttcaagcaattctcctgcctcagcctcccaagtagctgggactacagacacctgccaccatgcccagctaatttttctatttttagtagagacggggtttcaccatgttggccaggctggtctcctgccctttggtgatcaacctgccttggcctcccaaagtgctgggattacaggcatcagctaccacacccagccgttgcaccttgcctgattaattccacttggctctagctagtatctggaaggacacctgggaggaacacttcaaacagctgtcagtgcagtgttgttgttgtttttgttttttaattaataggcttttttatagaacagttttaggtttacagaaaaattgatttgaaagtacaaagagttcctatattcctagcctccccgacccctgacaaacagtgtccctactgctaacatcttgcatcttacatttgttgaaattgaactaatatggatacattattattaactaaagtctatagttcatgttagagttcattcttcctgttgtacattctgtgtttgacaaatagatgacatgtgtcctaacaactctttgtgctctgcttatttgttcctcccaatccccaaaacccctgatttttttttttttttttactatccctgtagctttgccttttccaaaatgtcataaagttggaatcatacagtatgtacccttttcacattggcttctttcatgtggcaatatgcgtgtaagtttcctctatgtctttttgtgtctggagttggttcctaccggtgggtttatggtctcgctgacttcaagaatggagctgcggaccttcatggtgagtgttacagctcttaaagatggcatggacccaaagagtgagcagtagcaaggtttattgtgaagagcaaaaggacaaagcttccacagcgtggaaggggacccaagtgggttgctgctgctggctgtggtggccagcttttattcccttatttgtccctgcccatgttccatttctgttctgtcagagtgccctttttttcaatcctccctgcgattggctacctttagaatcctgctgattgatgcattttacagagcactaattggtgcgttttacagagcacttattggtgcattttacaaagtgctgattggtgcattttacgaacctcttgtaagacaggaaagttcctgattggtgcattttacatcctcttgtaagacaggaaagttcctcaagtccctacttgacccaggaagtccagctggcctcacctctcaatcccccctctaaacaggacaccccagctgctgttgggaactgggtgatgactgctctagctacttcctgctggataggggtgaagaaggggccctgcagttgtagtgccctccagaggggaacactctaggccaaagggctggtgggtcagtccaggggtccttggtagaagttgtgagttgagctcatttggggttccatttgtaagaccatctgtagcttgatggtatcgatcctggaggaaacaaatttgacaaagaggttaaaaacacagggcccgaaggtgagtaatagcaagatggctgtcatgggacgtagaaaggggagaaaccatgttgcccaactctagaggttggtataagagtttgaaaggcattgtctgatttcagaagccttttcctgtaactgctgggcagcatcttgtactatccctgagtggttagtgtaaaaacaacagtcttctcctaagaaggtgcagagtcttcctttctcagcagtgaggaggtctaggccttggcggttttggatattcactactgccaaagagtctatttgggattgcagagtaaggatagattttgttatttcttgcaaactgtcttgagaaatcctttgagagtgtgtggtagtaggataatgaagtagataaactggctattctggttcctgtagcagtggctattcttaaccgtataagtaggggtattagttgtatggccctgtactgacggacctgagctttgaggggcactgatagggtctgatttcctgcggtaatgttaatgttgggacttaggaagactaaggtacaggtgcctgtccagttagtggggaggcagatgtaagttgaagttccacataagaatatgccttggctgggtagacagaactggttgtgtatgttaaaaaggtgtgtgagtttgttgttttcattttcccatactcctagagtacttgccaaggtagtctggtgagtggctggaaaggggtgttgggagcaaactgagtgactccctgtgctctattttcccattggagaaaaaactgttttgtatctactaggaaccattcaagagagtgattgaaagagaggatgagaaggtattccttagtggtgggggtgctgctgcagggggtccaggggtgaatagtcatacagggagtatgtttgccattacaaaacctggactgtttgttaagcagggaggaggtgatgatttttgggggccctgagaagcggacaagccatctgaatagagcggtttgggtgccttggaagttactatgatcatttggggcttgaagttggagagtgtaattacactgatgggatagtaggtgccccaggggcaggcctgataacaggttgcgttggatgcataacggggcttggaaagttaagatggtattcacggttacagggcttttcattgctcatgtaataggtgaggttggaaatgtaagagcgtaaaagctggattgcatgtaaaaaaggttgatgtgattaggatttttgtcccggcaggagctacagtatatagtcctgctgcaaagagaatggttagtatactgcttaataatgtgatgaaactgtaaaaggattccattaaaggggcaaggagtggtgttaaagattatgtaggttttcacttatcctttttaaataggaaagagtttttccttaggatcagctataggggcctttttagtctgggatgtttccttctgaaataggagacacaaatcttccaatggttcacaggtttatcgaggctggtctggctgatcttgggactcctgagctgatggtcctacaggttcttcagggggtgtccaaagtttaactcgcatgtagtgaatccaagattccactcctgccaccttaactgcagtgggggtagagaggattactgagtatggtccttcccacaaggaatccatagatgaggaggaagaggggagggacttgaccaacagtaaatctcctggttggaacaactctgttcccttgtctctgtgacatcctttgggtaggtttttaacgttttgttggtattttgccaaagaagttatatctttgaccaacttggccgtttcctgatcaagtaggaggtcatttgtgagaaaaggtcatccatacagcacttcatatggactgagccccattttgtgaggagaattttggattctcaacaaggccatgggcaagagagtaggccatgggagatgagtttcttgtgttcgtttccttaagtgcctcttgagtgtttcgtttgccttctcagccttccctgaggattgtggcctccaggcacagtgaaagtgatattgtatccctagtgccctggaaattccctgagttaccgtggctttaagagccggaccattgtcgttttgtaagctttggggaagcccaaatctgggaattatttcatgagttagtactttaaccacttcctgagccttctccgtcttgcaggggaaggcttctatccaatttggttggtcaacacagaccaacaagtattgaaatccccttgacttaggcatatgggtgaagtctaactgccagtcctctccaggatagtgacctattctttgttccccaaaaggggccttacgatggaccaagagatttttcctttggcacacctcacaggctttgactacttgttggatggtctggaggagatatggccccataaatagggatttggccatttgatgagtgttctcaaacccatgtgaaaagtttggcagggggtcttaagtattttccactggctggcttcggatatgagtacctttccctcttctgccgttaaccaccccaaggggagaaaactatgcccccgtgaaagtccccattctgtttcgatcagggagtactggggcttaatctcttggagggggttgttccataccatgggtccttccataggtatttctaatgggaggttctgcctggcagcaattttggcctcagcatctgcccagtggtttccttctgccttttctccttcacctttttgatggcttcagcagtgtaacactgccacctccttgggtttttgcactgtgtgcaataactccataatttccttgtggtatttaatgggggttcccccagaggttaggaactccctttctttccatattgcagcatgggcatgtaggattagataagcatacttgctatctgtatacacatttattcttttttcctttcccggttctaaggcttgggtaagttctgctaactaggcgctggtccgtggggggaagagacttactttcaagtactgttacatcactaactatggcataacctgcccttcatatcccattctccacaaatgaacttccatcggtatataggttaaggtcaggattagctaagggtacttctaagagatcctgttgggaagcataagtctgggctacaatttgttggcagtcatactcgattggttctccatcctctgggagaaaagtagcagggttgagggctgcacacgtgtgtatttcaagcaccagtccctgaatgagtagcgcctggtacctgagtaggtggttttctgatagccataaatttcctttggcacctggtatgccatttacatcatgagtagtctagatggtgagatcctttccttgtattattttgatagcctctgacactaagatagccactgccacaactacccgtaaacagtgaggccagccttttgctactacatcaatttccttacttaggttgtggggttccttccttactggttgtggggttgtcctacaagtctgagtaaggactccaagagctattcccgctctctctgtgaggtataaagagaagttttgtcctggggaaggcttaagtcttgagtttgtactagggcctgctttaaggttttgaaggctgtttctgcctctggttcccattctactagatgaatatttgccctctcggtctccttgattagagtatagagtggcctggccatctcgctgtatccggggatccatagtcggtaaaagccagtgatcccaaggaacccccacaactgttttaatgtgttagggcaaggacaagccagtataggctgtatttgttctttgctgagggccctggttcctctggctaggattaggcttagatatttgacttgttgtaggcagagctgggccttcgatttagatgccttgtacccttgattagctagaaagttcaagagatctagagtagcctgctggcatgaagcttccgaactggtagccaaaagtaaatcatccacatactgaaggaccagcatgcctggacttgagaagtggcctagatcttgggacagtgcctgaccaaacagatgagggctatccctaaacccttgaggcaagaccgtccatgtaagttgggttttgtggtctgtgggatcctcaaaggcaaagagaaactgggagtccaagtgcagaggaacgcagaaggcagcatccttgaggtccagaacagtgaaaccattctgcttcctttggtatttgagagagcagggtataggggttgggtacaaccggatatagaggaattacttcctcactgatgagtctaggatcttgcactagtctccactgacgattcagtttttgtactcctagaattggggtgttgcaggggctactgcattttcttactaagcctcgaacttttaaatgtataacaatatcctgtaatcctttatgagcttcaggccttaagagatattgcctttgataaggaaaagtggtggggtcttatagcctgatttggactgggtgggcattttttgcctttccgaattgtccttccaatgcccagacttcagggttgattccctcctcaagtaggggacaacaaatgggtaacttgttccccatattcatatagttaatggctccagctttggctaatatgtccctccctaataagggtgtggggctttcaggcataagaaaagcatgtgaaaagagcaaagtctcccaattacaactgaggaggtgggagaaatacctggttacaggctgtcccaggattccttggatggtaatggatcttgaggacagctgtctggggcaggagattaacactgagaaggccatgccagtgtccaggaggaagtcaatttcctggccctcaatggctaaacttgcccagggctcagtgagggtgatgacatgagctggtgcttgcaccaggcaccctcagtcctgttgttggatcatctggttgggggcttctggcccggagaacctttgtcctctggggcagtaccccgtctagtgattgccttggcatagtggacatgggtgagggagtagcttgtttcttgttggacagtcttttttaaggtgtccttgcaaaccacactgataacaagccctactgggtgattggcctgctccattttctgtcctctctgaaccaccaaggtttgtttgtctgagggccatgactgaggctgcggcctttctcttatctcgcttttccttttctgcctgttcctcttggttcctattagagaacaccgcggttgccaggtttaataatgcctccagattttgttcagggccaagggctcgcttttggagctttctcctgatatctcagctgattgggtaataaacatcttttaggatcaattgaccctcgagggagttgggtgacaggggagtatattttcttaaggcctcccatagctgcttgaggaaggcagtaggattttcttcctttccctgagttatggtggacatcattgaataattcatgggctttttcctaattctccttagtccttctggaatacaggtcaacagatgtttgcgactccagttcccatgatctgagtctaggtcccagtggggatccataatggggatggcttgctgcccattagggaatttgtccctttcttcggctgtcattttgtcatttacttgactaagataccaggtatctccaaattctcgggctgcagctaaagctgcattcttttcattaaaggccagggtttgatctaacaatagcatgacatctctccaagtgaggtcgaaggtttgccctggaccctgtaggacatctatatacctaccaggatcatctgaaaactttcccaggtctaccttgatctgctttaattcagagagagagaaggtcccatgttgggccaaattcccctccccctacagcttaaaggagacataactgatagcctgaggggtttggtggtcctttggaaatttctttgcttgtttccttctggatggaggagattagaggaggctcatcattaataggaaggggagctgtagggaggctaggatatggaggtaatctgagaggtcctcctgtggaatgtaaatcgccagctttgcatagttgtggattatccttcagtaaaaagaaagcttggacataaggtatttcactccatttcccttccctcttacagaaaaggtcaacctgcagaatagtgttgtaatttatacttccctcaggtgaccatttttccctattagagagataatattaaggccagaccgtagtgcagaaaaaataagccgcttctttttcagggtttgcgggacaaattggtcccaatggcttaggatgcgtttcaagggtgagcttgttgatgcctgggtgtttcccatctgaaagaaaaaaccgcctgcagttttttttttttttctcttctccctgcccaagaacccacaacagtccctggatcctgctgttcggaatagctgtgctcaccaaagcagcagcggaaacactagttttcctcctagaccacaaaaaggactgaggaaggtcagatttagtggcccttaccaatggattctcaaaaacctgcacccttgcctttcgtctttagaccacaaagaggactgagaaaagtcagatttagtggcccttaccaatgcattcttgaaaacctgttagagtcctaagtgttttctcctgttgttattaggaccttacccttgtactataaagataatatgcctcaaaatggagtggagggccataccctgagggaaggaagggatctccagggttggaagagtgatgcgttttgtcctcacttatcatatgaataggaaggatataatttctgagtctcctcctatcctagctttgggaatagcctttgttaggtctgctagtctgaggagggatcctaaaattccagatagtcccccacaacagggctttggacaaaaattatgtctttctgattggtgagcctgggtgcctaaagaagggagcagagtcctgaaatttatattagaaatcatccttataggagaaactggaagagcaccagggacagggagtggtttttagaagcaagactaaccttggagaagagaggcgggagaaagtttgtctgacaggtgttaggacccaggaggcaagggtcaggatagataggatagatgggtgagtcttgtttgggctatgtaactttgagagttctgctcatggctgcagggccaaccaactttttgttgagaccccggagctgaatggctttcctctctgtcgaccctaggcttagcccggaagtgcaggaaaagcagaagctggttccaggcaaaccaatgctcctgactccaaacagtcgggggttgttagtgagccctttcccagagagcctgacatccatgtccttagtcctgtggccatgctagttgcttttaactggctgacaggtgcctagttttagcccctgaattctaaggaaaaataggacagaatagcaagcaaaaggggtctgatggtactcaccacgttgcaatatctgggaggatcccccaagatgtgtccagagttggttccagccggtggattcatggtctcgctgacttcaagaatggaggcacggaccttcacggtgagtgttacagctcttaaagatggcacagacccaaagagtgagcagtagcaaggttaactgtgaagagcgacaggacaaagcttccccagcgtggaaggggacccaaatgggttgccactgctggctggggtggcccgcttttattcccttatttgtcccctcccatattctgtttctgtcctatcagagtgccatttttttcaatcctccctgcgattggctacttttatactcctgctgattggtgcattttacagagcgttgattggtgcattttacagagcgttgattggtgcattttaccaagtgctgattggtgcgctttacaaacctcttataagacaggaaagttcctgattggtgtgttttacaatccttttgtaggacgggaaatttccccaagtccccactcaacccaggaagtccagctggcttcacctctcatttttatggcctgaaagcttatttgtttttagtgctgaataatattctattgtatggatgtaccacagttcatgtacccattcacgattatgaatgaagctgctataaacatttgagtgcaggtttttgtgtggacttaagtttttagtttatttgtgtagataccaaggagcatgcttgccacattgcatgttaagagtatgtttagctttgtaggaaactgccaaactgttttcccaagtagcttactatttgcattcccacccgcaatgacttgagagttcctatggctctgcatccttgccagcatctgctgttggcagtgtgttggattttggccattttcataggtggtatcttgtgtttgttttaattcacagttccctagtgattcataatgtggagcatctttttatgtgcttacttgccatctctatgtctaatttggtaaggtgtctggtcaggtcttttgtccattttaaaaactgggttgtttgttttctaatagtgaagttttctacagctctgttgtgtggttacttcttttttacatcaagatgagtcttactacctggttagattgggtgttacttgtagagatgctctccttccttccttctgtctcctagagcatttgccacacttcagatcctcagtaaatacagtcttcccaacccaatgcctgccacatgtttcctgacctcaagttcatatatcctctcgcattccctttactcctttccatacataacagtggtggtcactgctgagtccccctgaaggtgagcttatctacctctttttatatccaagctgcttaattgctataatatccaagctcccagatcacagcttttagttctttttctgaatctgaactggtgataagattaagaaatctcttggttcttttgcattaatttcttggttttgctgtctactataataatttaatagcatattttaaaaatgtttctgatggctgtttagttttgtctgctgactacaaaggttgttttgacctcatcttgctgacctgccaaaagcactaagtctatggcagtaagagagtggaaagtctgttccagtctctgtataatacaattacatgtactgtgtagcaataataattaacatgggaggaaatcagtacaaattagggatattcctgaatcattggctacactgtagataatgcagcttctcaagccagtttgttacaaatgggctacaggtatatccaagtatggattgcctcagccctcaggcagccttgacccctgaggctacagagcccctagcagggggggttaaccatttatgcaattatgctgctgcccagatgttattttctatacaagtagttcctttagagagagcaagtgcaagccccaagcactggcacaatatggagtggggaaaacaatgattttgaattcagaagaattcagttcctggtcagctctctgatggcagggattttgtctgctcagctcactgctctatccctgtacctaaatcagtacttggcacactgtaagcactcagtaaatatttatcgatctaattcttctgtttttttttttttttttttttttttttttgagacagagtctcgctcttattgcccaggctggagtccagccatctcagctcactgcaacctccacttcctgggttcaagcgattgtctgagtagctggaattacaggcacgtgccaccatgcctggctaaccttttttgtagttttagtagagacggggttttgccatgttggccaggctggtcttgaactcctgacctcaagtgatccgcctgactcagcctcccaaagtgctgggattacaagtgtgagccatctcgcccagcttcgatttaattattgaagcatacttgaattcaagcatgttacttaatcctctctgcacctcattttccagaattagaaatatagtttattcctatacagcagatataaatttatgtgtagacagttgggctgttgttgtaacctaaaagtgacatatgcacaacctgtagcacaatgccaggtacagagtaggggatccagtgggttctttcttaccctctttcatttgaagtttttaaagtatcaggtgaagatgatgatgatgatgataatgataatgaaagtgatattttttgcatacatttcagtaaagttcattaccttacactgatgtaatcctcagagcaattcttagacaattatggttttttaccccctctttattttattttatttttgagacggagtctcactctgtcgcccaggctggagtgcagtggcgcaatcttggctcacttcaacctctgcctcccgggttcaagcgattctcctgcctcagcctcctgagtagctgggactacaggcacctgccactacgcccagctaatttttttgtatttttagtagagacggggtttcaccgtgttagccaggatggtctcgatctcctgaccttgtgatccacccgcctcggcatcccaaagtgctgagagtgtaccccctctatcaatgatgagactgatgctgagaaaagtaacatgattatgtaagattacacaagtgaaacacaccaaaaacagaccttgaacccagtttttttattttctcacgtcaacttttcctccacaccaaatctaataaaattttataaagaattactttaaagactaaatcactttcgactagcatgttgtctggatgcaaatgatggtgataaagtaagtttaataatgcttaaaggaggtaaacaattcctaaaccttttaaaaaatctagtcagctaaagtaggtttacgctaaactttcatcagaatccttaaattctaaatcttgaacttttaaatcagtaatagagttttaatgtgaattaattgtctgtaacattttcaaaagataaaagtgataaatgcacaaacctacctgctattataaaacttgttgtggtggaatgagacaagaatagatgtactataagaacaagagggatatgaagaggcaggtttatgtcgatacttaaaatacatttgacgccatccttttgacaggaaggaatgtctttaaaatctcacaccagtgagagtgggaaaaaaatcagccatatttctgctttttttaccctttcattggaatgctcagtcacttggtctactctggttttgattcacaaatgagttttcagaaatgactgtcccactggctttttaaaagaaaaattcagtttttcctctgaagactgacacacaatcactcagagatggataatcctaaatgttttccttttccagctgaatttaatcttatgctatcaacaaaatctggaaaggtttactttctcatatcattcattactagttatgaattctgaaccgtatttgtaacctgttcatcacatattcatccctgcatgtattcattccctaaatatttattgaatgccagcaatacaccctgaactcggagaaaacataatctttaccctcaaaaagctcacagtctggtgctcagttgaccaaacatcgtgtttcttttctaccgagttgcaggtcttctctctgtggatgtcattgaatgtcgtttgcagaattctacttgctatagtaggcatctgtcttgttcatgagccacattacaacctcgtgtgttataggcaaaaaggcaatctaagaacggcctgacattcggacgcctaaggggacttccctagtgagggcacaagacagacaaatcccagaatattttctatatgcagaggaaacttctctggcatcttagaaagacaaagacagcaagactgaagatagaaacaggaggatagcaaccttttaaacaacttgtttttgtgaaatttgtttctgtttgctttgagaatgggggaaaagagaactctaattacaaactccacgtttctttcaactatactattttctttctttttttttttttgagacggagttttgctcttgttgcccacgctggagagcaatggcacgatcttggctcactgcaacctccgcctcctgggttcaagtggttctcctgcctcagccttctgagtagctgggattacaggcatgtgccaccacgcccggctaattttacatttttagcagagatgaggttcctccatgttggtcgggctggtctccaactcccgacctcaggtgatctgccggccttggcctcccaaagtgctgggattacaggcatgaggcactgcacctggcctttttttttgagacggagtctcgctctgtcgcccaggctggagtgcagtggtgtgatcttggctcactgcaaactctggccctcgggttcaagtgattcttctgcctcagcctcctgagtagctaactaatttttgtattttcagtagagactaatttttgtatttttagtagagacagtgtttcactgtgttggccaggcttgtctcgaattcctgacctttggtgatccacccacctgggcatcccaaagttctgggattacaggcgtgagcaactgtgcccaaccagttatactattttcaatcctatataatttgtacagctgaagtggcaactgcttgcttttaaatgggaagagaagatgtccccatttaatgcttagaaaagattgacttcggtttaagccaaaggagcatcctggagaaccgaatgattcatgattagtaattctcaaggaatggccatgtggctcttcatagcgttggcccttgggggggtctactttaatctttgttctaacccccgccgcccctgttgtccttttaatcctcatggatcaggtgcgttcacagataaccactaaagtgaggctgaaagaggttaggatggggatggacacctgtatttctgagaggacctctccatgatgtttaggaatggggttgacatccttcacctagaaggtcctttcccaagattggacattgattttggtcgctggagcagcctcatcagcatttctacaaggtccccagaagggaggaagctattcattgaatacttcatatggaggtggttttatgttatttttatgagatattaaggaatcttcagaaactcatagcatctccatgttgcagataaaagaggctcgatggaatgggagtgagtcagttcagagttactctgctaataataaacgtgctggctttgaacctacgtctctctgagtaataagcccctgccctctcttccaaagcacattccttcccttgaatcagagagcactagatgggaagggtgatgggagctacattatcactggcagatggaactattcagctcctgtccttccattctctaagaaccatgcatgtgtgtaaacacatgttgcatcagtgattgttccaggctttgcctacttgctcccaaacatgtgaaaaagaagaggaagattaagtaagtcattcatatattacttatatctgagtgtttgcaatcatataggggagcatagttcccacaaggaccggtttttgtaaacttttgcttctctttcctgtatttaggcattatatagctatggcagtgatcacccacaggtacaaattctgtatcattcattgcctttacttggaggtttacaaatatttttagtctctacttctttttcaaacacaatcttgaaacctcaacatatgaaacgaataaaggaaaattttgttagcataatgtatgttagatttcagcgtgtaatgctgacttataaaatcaagaagaaagaacaatgaagctttgtgatgaacacagaaatttgaaagcagtgttagagatgacagctgcaatcttctttaacttcagtttccaatttattgccttttgttgttaggtatattttttatgttgttgtgcagtattgagaaaaccctgattccctaaaataaggagttgcaaataataatgagttgttttatttttttaaacagttaccttgcaagctcaggatatgttttcctttaaacttatccacttaaaacgtgttcacttaaaacaaaaggaagaaaagaaatggcttctttcaaagctgatatcgctaacaatgtgaaaccatttacattttttaattggtaagcctgcgatttggaggaccaatgatagcttcctctagcctaaatcttccattagagggagaaaacactttttaaattataacattaatgagatgctcattgatgtacttaaaaaacaagaagaagaagaaactcataagcctgagggagggctcatctctttcaattttagaaggaagaaattgtctttgctttgcatggtgggtccaatcttgaactttagatttaatctctgacattggctaccataagcatggtatgtctgacagtttaatgccaataatttaattttattacaccattttatactacatgtttatttattacataccaaaattcactgaggacaagaactcagggtgttttgtctggtcttggccgttaattgtccatgatacactcatgctgtactagggtgctcacttgtgaaatttcatgcaagtggacgtagggagaacttaagtttatatgtttaaaaaaagcaatggtagcgctacaacctttctacctgagaaacaggatgtcactgagatgacgggatacctttattttgagatctacacaagcctggcagtatggtctggcccattagtagttgtggcaatgccaggatggaagttacatttgattaacggggtaactaagaatctaacttcagaagaactcttgctatcccctttaaccctcacaacaacagcaacaaataaatcagttggcaaatcttgaagatgtagagccttactaacaaaatggagttaagaaaacccttcatgcaagcaaaaaagcttgatctctgctagggacatcaaaggtgcagtggtgtggacgtccagacacagatctgatgtaggctttcctcttgggccttagcctagctcagtggttttcaaattccactgtatgtgagcattgttgcacagggtggtataaacaaaaactgtatatagtgtccttgttgggcaatgtaagacacttttatttattgagccaatacttacagagtgccttctctgtgctaagactcataggtgctgcagtttgagcaaggatgaagagaagtcagttaatgggtgatacaaaaatacagttaaatagaaggagtaagttttaggattcaatagtacatatcacttgtacccccaaaatatgtacacctgtgatatatcagtaatgaataaataaggagcatcattctagcgcaggaaacaaaccaacaaggactttgtggtgtaacatcagctgtgatgaatgaagagaagaatcagaggggcgagggaagagggggcctgctcttttagacaaggcgaccagggagggacacatcacagcagagacctgaatgaagagaactcatttgccagaggagcattctaggtaggaccaggattgtgcctggatgtggaagggagtgtggaggccactatgctggagcagaacatagggaggagatgggcaggaaaaaagaggaggagggtttcacatagttggggtcagatcatgtagggccttctaagtcttgacatggaccaggactgtggtttttaccataaatgtaataggaagcattgaaaggtttgagtggaatggtattaggatctgatttgcaccttacaatttcaaggatacttttgaacccacacactctgcattgggtgggaactttagaccctagcccctgaattaagtgttattctactatatggcacatggagagcttttctgaaactacagttacttaataatgagaaattcaatttaaaaataaaacgcagatgctctgaagcccgttggtagaatctttggggcttttaaataagtttaaaagctacaagcttcaataaagattaaattagaaatcctatataaagcttctaagagtgtaactagcattttagtaatgcttactaagtgctggttctgtccctttctgctctcctattttttttatcagcgcctttgctattaggccaggcgcagtagctcacacctgtaatcccagcactttgggaggccgaggtgggaggatcacttgacgccagaagttcaaaaccagcctgggcaacatagtgcgattctgccttgataaaaaataaaaataggcagggtgtggtggctaacacttctaatcctagcactttgggaggctgaggcaggtggatcacttgaggccaggagtttgagacaaacctggccaacatggtgaaaccccatccctactaaaaatacaaaaattagctgggtgggtggtgggcacctgtaataccagctactcaggaggctgaggcaggagaatagtttgaacccaagaggccaaggttgcagtatgctgagatcatgccactgcactctaacgtgggtgacagaacgagaccctgtctcaaaaaaattaattaattaaaaatttttaaaaaatacaattaaaaaatacctttgctattgatgtctgtttctgattgtctgtcatcccggtacactatatttactttccagggaaactgagtcattcaacaagcctctggcttctagtgataagcactatcattagaaagaattatgttctgtgtgttaaggataagggacacattctttttggaaaatagtgcttgtgagtctaggaatagttgtataatctgggaatatatgctaatgctatagctgagttcaaatcacttttttaaaaatgcaaacttatcttctctgtcaccaagcatgtcttccatacaaaaggcacatttctgtagcttcatccatgttactctaggctatttcctctagtttattaaccacacgctcagcaaactgtagagagtatggtctgatccctttctcccataataaaaattttaagactatgtacttgttgatagatgacaccaacaggatatattttacagaaatgaaacaacaacatgtgaagaatattttaggtcactgtaaagttcctttaatagaaaaaaaactttagatttaactgttaaaccctttgaaaaagaaataatttatttcatgcaaatgactaaagcaaaatggagtgtgcagaagacctacctgcatactgtatgtaaaatacagttttctgggcttcactcccaggaattctgattcacaaatctggggttgggcagctttcaattttgagaagtgccccgagtaagctgatgtcaggaatgtgaattttaacaggcaccccaaaggaaggctgtgggaaaccacatttgagaaacactgccaaattaccaaaggaactttaactttgtgttatagaaatatcaaacacatttaacagacacttctcaaaagaagacatttatgcagccaaaagacacgtgaaaaaatgctcatcatcactggccatcagagaaatgcaaatcaaaaccacaatgagataccatctcacaccagttagaatggcaatcattaaaaagtcaggaaacaacaggtgctggagaggatgtggagaaataggaacacttttacactgttggtgggactgtaaactagttcaaccattgtggaagtcagtgtggcgattcctcagggatctagaactagaaataccatttgacccagccatcccattactgggtatatacccaaaggactataaatcatgctgcaataaagacacatgcacatgtatgtttatggcggcactattcacaatagcaaagacttggaaccaacccaaatgtccaacaatgatagactggattaagaaaatgtggcacatatacaccatggaatactatgcagccataaaaaatgatgagttcacgtcctttgtagggacatggatgaaattggaaatcatcattctcagtaaactatcacaaggacaaaaaaccaaacaccgcatgttctcactcatagatgggaattgaacaatgagaacacatggacacaggaaggggaacatcacactctggggactgttgtggggtggggggaggggggagggatagcattaggagatacacctaatgctagatgacgaggtaatgggtgcagcacaccagcatggcacatgtatacatatgtaactaacctgcacattgtgcacatgtaccctaaaacttaaagtataataataatataaaaacttaaaaaaaaaagaaatatcaaacacatttgaaagcagagaggtggtaaatgaacgcttttgccccaccaccccattcagcagcagagccaacatcgttttctctactccacctctgcacctggattattttgaagcaaattccaaataacagtattccctggaccttgcatcttcataacagattgctgttgactcaaaatatctataaaatattttactatttctataaatgattaggattcttcttctcatacacaactacaacatcatcatcacaccaaaaaatgcattaacagtcatttctcaatatcatcaaatatcccgtcagtattcatattttcctaattgacttattaataagttttattttatgttgtaggattttttaatagtttatttgaaccaagatccaaataaaggtcatttcggtctcctaaacctcttttacactactcggtatcacctatgtcttttttttattttgcagttttttctgttgagaaaccagaccatttgtctggtagaatttcccacccgtctgggtttggatgattgcctccatgtggtgttgctaagcatgtccctctgtctcctgaatttcttgggaattgctaggaagttctagaggcattgttttgtttgctttgctttgcctgactgcttcatagttggtgttgtgttgtgtatttccttcaggaggtaatggttggtggcatctctttttgcagtgagactgtcatctgaattcataaatttatcagggattgcaaatagtggtagtctaattctattattatttgttcatttgttagcaggaattattgttcatgaagagaaactccttgcatctgtaatttatctacccggtgcttcaggttttgtaggaaaagcaggataatatactagattctgtctatttaccaatttgcacgatacagctagttcacagtgtcaaaccaagtcactgtgttttgaaagcatgactgtaaattcatagattgcagcatatctgttgtgtttcagtccatgacagtgattaccctttttcatgttcagatggtcccctgtctgagcattgggatcctattcagtttggctactgagtccttttaatccaatactggctgtctttgatagttttcttgctttctagtataacactatgttccaggctcatcttgtacatttcttgccttagctctgggatcagcttttttccaaggagacctggtttctttcagtgagaaatgatatttggagaccaaagactgggccccaggggaactgttctcactgggttgaatattgtttttcctttccagtggacacagccagtgataggaaatctgtgtctctctagatatagatatagatcgattgtgtgtactttttttttttttttttgagacggagcctcgctctgtcgcccaggctggaatgcagtggcgcaatctcggctcactgcaagctccacctcccaggttcacgccattctcctgcctcagcctcccgagtagctgggactacaggcgcccgccaccacgcctggctaatcttttctgtttttagtagagacggggtttcactgtgttagccaggatggtctcgatctcctgaccttgtgatcggccctccttggcctcccaaagtgctgggattacaggcatgagccatcgtgcctggccgtgtgtacgtattttttaaggtaaaatacctcatgagtttatactgatgtgccacaaggcttttacttaacttcattcattttacatcagtattttctttctctcaaactgaaaatagcagttctcactcacaccaacacaatttactcatttactttctcccacactacacttgcaataatttccgaacaaaaatgccagtgacattgcaacaatatgcttactgaaaatgtttaaggttttttttattttgattgtttagttttgtattggtttttagtccactgggctagagatggacaattacattacaatatgttagggtcatttggaatagttacagtctgtgtgtttatgccaataactggatatacatttgagttcacttactttaatttgagacttcctaagaggcttttgaaaagtgattcttgttcaataattatataaaaatatttaaattttcctgaaacaaaacccacaaaacaaggtgaagtcgttgaagtctgtctttcatgcctgtctgctttattttctcctttttaccatttttaggcatatctttcatttttattataagcaatcatactatttaggtaggtttttttttttttttttttttttttgctccaatagatttatttatttatttagagacagggtctcactttgtcacccaggctggagtacagtggtacagtcttggctcactgcagccttgaactcttaggcttaagcaatccttctgcctcagccccccaagtagctgggactacaggtgtgccccaccatgcccgctattttttttgtttgtttgtttttccagaccaagccttgctctgtcacccgggctggagagcagtggcaccatcttggctcactgcagcctcaccctcctgggtttaagcaattctcgtgcctcagcctcctgagtagatgggattacaggtgtgcgccaccacgaccaggtaatttttggatttttggtagagacggggttttgccatgttggccaggctagtctcaagttcctggcctcaagtgatccacccgccttggcctcccaaagtgttgggattacaggtgtgagccaccatgcccagccttccagtaaaaatgtttagaataattccttaatatggtacccttcttatcccccaaacttttcttagctgttgtttattggtttccaactctgagtgattttgaaattcttagtaccctttctttcttattttcttctctggctataatttgatttaaggtaatatccttttactcccacttaacatctatgttagtgagattattttcgttcctttcatattcttcccgcgtgtttttttttaatcattatactatctatattgtcagggcacatagtcattatatcgttctggctatatgtaatattgtttccttgtaatcatctttcagtaacagacctacagctgattatgtgttaaatgctcacccagtctttgtatcagtgcctttccagccagactggttgcctgactcttctcccttgcagattactaagggtttctgcgaacaatattccttgggtccttgcatattcataacagattgttgttggctggaagatcattttggctgggtataagatccttggcttagttgtctttcctgagtgtcacgctactgacttttagcatgaagcctggctcttgaaaaatcgggtgacactctaattttctgtcccttataggtaactcagtcattttacctgagtgtccaaagaatttttttttgttttctttcctaggtcagtttttccaggtgcatggagtattctgtcaatatatagtttcaaatctttttctacttctagaatttgtgcttcagtcacgattttaagcatttgctgtttttattgcttttcttcttcaaaggctcttattacagtgttatgttgggttttctttgctcatgttccttttctgagtctttctcttgaattctatttctttcctcatttctttttgatgtttaacactttctcctttctattttttagcactcctcaaagattatctgttgtatgtattccctcttgtgttccttcttatttggtcttcatctagaaaatggattttcttttttcgttttcttcaaattctttcccacgttcttttgcctctctctatccaactatttcttttctccaatcacttcatttctgaatgtttttattgggattagtgttcctttatctcttcttactgcctcattttcttttagctcttttgaaatattaaagttttcatctgttttgggggcatgtctctgtggtaagaatgctactctgatttttcttcttataataactgtgcactgtatttgaccacaatcctattttgttactcatttttaagtggaatgagttttcttgtatttttagggataagggatgggccagaaaatattttctagtgtctaggccatagaactccgtcttctgttgtttccatggaataaaataaggcctatattttcttagcttcgtcttctctgcctcccttcacttggatctgccccctcccttcactttggctaaattattactgccatgttcgatttagattctgctctcaaaagtttcttctcaaggtgatttggtcgtggaaggaagcttagatttgttggtctcaagagtgccctggctccgtaacacctaagcacctcagaccttcccagggttccttgccctcaccccatgaattggattctgcaggaccccttgccaatgatgctgctgtgctcaaaatagctcaccaccctgctgaccgtgccgtaaggacctttggaagcttgggagcccgttgtgccaaaaccttcagatgcccactgcctctcctccaactttctcttgcacagatattgcttctgcctggctctgtcactataaatggttcggccacacccattcctgtcttcaggtttatggactacacagtaacctcattttgtcttgatgtggtccatgggtttttggctgtgtaattccaatttctctgtttttgttgttatcattgctattgttactggcagggaggaggagggcagggattctgaaaaatttttttaaactgtgctacctttgacactggtgccatcatcttccctgaattcccgctttaattttttcttttcttttcttttttttttttaagacagggtctcactctgtttcccaggttggagtgcagtggtgctattttggctcactgcaacctctggctcctgggttcaagcaatcatcccaccttagcctcccaagtagctgggactaaaggtgtatgtatgtattccctcttgtgttccttcttatttggtcttcatctagaaaatggttttttttttttcttttacttcaaattctttcccacgttcttttgcctctctctatccaactatttgttttctccaatcacttcatttctgaatgtttttattgggattagtgttcctttatctcttcttacttcctcattttcttttagctcttttgaaatatcaaagttttcatctgttttgggggcatgtctctgtggtaagaatgtgccaccacgcctggctaattttttgtatttttggtagagatggggttttgccatgttgcccaggctggagactcctgggttcaagcgatccacccatttagacctcccaaagtgctgggattacaggcatgagccaccgcacctggccccacttcaatttttttttttttttgagacgaagtcttgctcttgtcccccaggctggagtgcaatggcaccgtctcagctcactgcaacctccgcctcccgggttcaagtgattctcctgcctcagcctcccgagtagctgggattacaggtgcctaccatcacacccacctaatttttgtatttttggtaaagatggggtttcaccatgttgcccaggctggtctcgaacttccgacctcagatgatctgcccacttcagcctcccaaaagtgctgggattacaggcgtgagccactgtgcctggccccactttaattttttaatagtgcttgagaagatgtttctgctaaatactatgcctctggattaaacctcaaatacttcaaaatgaaaagtttgatttcggtcacagatttttagtaaatactttttagggacaagaaaactacaaagtgctttgaaaaacaaaacaagctcaattttttatttgtttaacatatgtagaaaataaaattaatacacgtatcttttccaaattaacacagtatgaaaccaaccactactaattcatcaaaagacacaatttagatcaagtttaggcttggttaggacgctggacgctgagtaaatggtagctctgaggctgaaaaaaaacccctgagtcactctggtacacattctgatgtcagcatccccaccccaccccaacccttattcccgccccgcccccggccccgccccccccccccccccccccccgcgaaaagaagtctctagctctgaaaattggcttgttataactttacaaatgtagttgccaaattgccattgacatcacatttttctttttggcttttagtagctagatagtaatactataaaggaactctctgctttttctattttgtcctttttaaattcttggaggcccttcataacatggaacacaggatgggcaaacgtgcttcttatagtgtaggttagatttagcaccttttgacaaagggccttgtttcctgtgcagtttaaatttagatccactgagaatctgagaaattcagtaatgaaagggtaactttggagtttcctcttttggaagctttccttattaaattctattaatgactctgttagacttgattcccatcttacacaagagattccagaatagcaacttgaattgcttcttagtccctcttacgaagtcactccttcatttggcattgatcgagtacctcccgtgtactggctgacggggcttatatacagagccactaccttatttttcattctgttattttaagagtttcttgatagtccatctacttaagaagtgttgctattaaatttcagtctatctcataaatattattctgagatcctcctggctggatttataggtataaatcattcttggataaaatatacaatataaacagtaagtggaccagttatctgattatacgtgctctgagtctacagaaagacaatatcttggtatgtttcaggagacttgtagagatgaggtgtaggacttctcatttctaattaaaactaattaaaatttactgtctacaagggagatggattgaacatcacctttacctttctcttgacagcaatgaaacctgactcaaagctggcactaaatgtattatttcagtatctgtgtcctattatgtgttgtaatattttggattaaaaaatggagaaaaaataaacaagaaatttttatttctgctaaaaagtcaacagagtccattgttatctttctttgcttttcagatggcagaaattgggtgtcaggtcctataacacaggggttcccaacccctgggccatggaccattatgggtctgtggcctgttaggaactgggtggcacaccagtaggtgagaggcaggcgagccggcattagccagctcagccagcctaagctccacctcctgtcagatcagtggcagcattagattctttctcataggaaagtgaaccgtactgtgaactgcacatgtgagggatctaggttgtaccttccttatgagaatctaatgcctgatccccctacccctagcctcatggaccagtgccaaaaagtttggggaccactgccataagaagtcccgaccagaagtgtcacatctttctattgcatgatgctgcttcttgaacacccatagtagccaaggccagaattagtgtggcaccctcttccccagacaaggtccatggacagtgcatttcaaaatacaggaagctctccttacactctctgctacctagcttccatggttatcaagtaattatactttatgctgagccaacttatgcatttaggaagagatgaagagaaattatatcctcaaatgggctggaacaaaagggaataccaataatttgtaagttaatcaaattataattaaagcaggaagagacacaaggagcttggattatctatgttttctgttagaaaataatacaacaaaagtatccagggagtcttatcagttctgtaggaatttggcagaacagtaaggttataagttgtccttttaattcccagccacctctggcctctgcttaccatggccctgccttctgacttgctgtttgctcagctccttagtgcatgggaagagcagaaacatcaggggaagagcgctgagatctgctgtgcacctgtgccgcacagcccttcccatgtagacatgtgtagcttttgggtttgccagtggatggaacttatccgcatcaagtagccttccacgggggtggtgctgatacgcactcccacccacagccgatacagcctaatcacaagtggaacaatcagagtggaaagtagcggaaagtagcagcctctggtttccaaatgtgagagagcctcagggctcagtcctcaaacctggtctgttttttgttgatgccttcaaaccatctcaaaactgacaccttctccagcctgggccttttctttgaacctcaggcttgcatatcccactgtctcttaactgccttcagtgggatgaactcttgatattctaccccaacctgcttctcccactgccttcccatctccttccagttactcaggccacagttgttgacgttgtccttgatgcctctttttctcctacacaattctgctggtccacggtgccaccatctcttggctggagttcatcagtaacctcctgagtagtctctctgcttcttctcagaatatctcctccatgcaacagccagcatgaactggtgaaaatgtagtccagaccctgtacctcctctgatcaaaaccctccagtgcctctcagctcactcagagtaaggacctcagactttattgtggctcaaagaacttgtcacccccaccctctgacttcatttcctgctccccaccccctttactcagtgccaggaacaccacctcgatggtgttcctccaacacaccacacaggagcccaccccaggaccttggtaccttctgttctttctgtcaggaaggctcttcccccagtcaccacattgctttctatttccctttcttcaggcttttccccaaaagttactgtctctgtgaggtcttttttgactgacaagcttgaaaaaatggtcaccagaccaccaccctagcccccttttctgcttaactttttagcatctatcaccatttaatggaaaatacttcattataaatcttttatttccatgaggataggtaattatttgttgttgggggtgtctttgtcagcatctagtacagtgcctggcagatggatgctcaataaatattgatttaatgggttatgagggtgttaatataaaattagcatttattcagcaactactatgagtcagccactgggctaagtggcttacatgttaagaacctcacagaaggccaggtgtggtggctcacgcctgtaatcccagcactttgggaggctgaagcaggcagatcacctgaggtcaggagtttgagtccaggctggccaacgtggtgaaaccccatctctactaaaaatacaaaaattagccagttgtggtggcaggcgcctgtagtcccagccactcaggaggctaaggcaggagaatagctggaacccgggaggtggagattgcagtgagccaagattgcaccactgcactccagcctgggtgacagagtgagactctgtctccaaaaaaaaaagaaaaagaaaaagaacctcacagcaacctagtaggtgagcactgttactcttgttttacaggtgagaaaattgagccctagagaaataaagtaacttgcttcaggtctcatggttaaggggaacctgggccctaacagtccacttcctgtaccttcaaccacggctctaccgcctccgctaggagatggcccgaggacattccttagctggcttcagcttgctctttttcccctgcggtccacccctgtctcctgcttggtcatcagtgatttccatgccatcccatgtcattggaccagttgtgtgtttttaataggagttctcatctcactttctccacagctttgccaattctgctctccccctcctgtctaaataccttcctcccttggcttcctgaacaccactgtcttcgggtgccatcatccctttctggcccctccttcctaagtcttcaggtgttccctttctacctgctttctacgcctctaagtgttggagttcctcatggcttagtctctagaccactttgcttctccacttaagtgttctgctagatgatctcatccaaactcacagtgccttgatggatccatgactcctgcatccatgtttctaggccagacctctcatcatcttcgggcctgtgtctccagctacctactctgcacctcctttggggtatcacaatgtcacctgaactcagcacgttcaaagtcaaagttataacaatcaccatcccaccaaacctcatctacccaagaattccccatctcagccattggcatcatctagttacccaagacagatgcctaaaagtcctccttgaagcatttctgtccctcttcctctgcatctaatgtgtcaccaagtcctactgatgcaatctcctcagtgtctttcgaatgcactctctctcttccggcccactatcaccattctagtcctaaaacctaccttctttctaggagccacagcttctctggagtttttacacctcttccaactgttcccatcaccccgttcttttctttgacaacattttttacatataaaaataggtatttatgtgattatatcatgaatgtcttttctccccaactaagaagcactatgagagcagggagcttcctgtttctccccgttcaatcctcagctcctagcagcacagtgcctggtgtatagcagattctccatcagtatttgatttgttgagtgaaaaacttagatgtattaaatgacaaactgagatcaagggagaatgaagaatcaatcagaagcagatagaaaattatgctgtgtggtatggcaacatcatgaatggactgttaccgataatacacactgagtcatcaaagaaacattaacatgtattctctattttaaaagggaggtacataaatatagaaccaaataaacagatctcaggaacatttccattcagtaagcaaagttttagaagggaaagagaaattaagttcacatcatttcccaataacacagatgaatgttttccatccaattctgaggacaaagatagcacctcctcgcccatccatgccaacggaggctgaggtagcacagataattgaaattacagtgaagaaggaaaggggttgattgatttgcatgccatctcttttctttaatagtggaggaattgccaaaaaaggctaaaaatgggcaacaggaaaagggagaaacagtaagaatcttggataatcttccactagataattaagacttaactgggtctgttttgatgtgtgcacatgtttctgtacatggagaaggatgaacccacaaatattataaatgccaatttccgaaggcttttggaaaatgtaacccatagcatatggtgtcaaattaatttggggttttacttgtttcagtctgatttgggcacattgaattatgagataatagtttggcatccatgtttgctgagtgcttgttgtaagtttctcaatttcacaaaaattctctgaggttagaggacgcgtcgtgaccctcgtttggcaggtgaggaggtagcggcacagagccgatccgtggctcgcctgagctccggcaggaactcctgggcggagctgctgagacccaggtctgcagactgtcactctggcttcactatttctggccttcctttgagcacttttcttacttttgttctgtttcatgcacttaatgcacctgtttcatcatgctgcctgtcacagttaaaggaatttaaaacagaatggatcgtatttgacagtaaggagctgtacagctgaattccatcaagacaatgtgcttgtagccccaacggcattaaaactttcaaatgatgctttatcacaacttcctctgggctgcacgtgacaaaggggtgcttaaccaggagggacatctctctttgcttgtaggggcaggttgctgttttttgcccacctctaaaatctccttggagcactcagttcttcttatcctccttaaagccaacaactataaaatttaatttaatgttgaacagctgtttctgttgcggtccaggtgaaatttgaggtatcagctaattgtgctaaagttcccaaaaagaagtattcagaaggtgtggatcaccaattacctcttggcagagctgtgaactaataactagtagcagtagataatgtactcagatgccacatgaaatgcaaaagattctatgctttattccataaagcatggctataggacattgtctactatgtaactaatatttaaatatttatagatttttaaaagatttcttcaaccttcttttctcaccctgtttctagatctgatgcacaaaggaaaataataatacaaaacccataacctattcattgtattgttgcggtagatcgagctacatgctgcacagcaaaagaccttctttgcacttctttcaagcagaattattgctgtatattcactctgaactgagaggtgaggattgaactgtgtagtgcctcagaaaatatcaagagttttaaaacattagttttgagagattgaaatacatagaaacttggaatgtttgaatgtcagcccagacattggcaggcttccatgcagatttcattgtgagtaaaatgtgtactcagtggctgggttcaagcccttcatagtttataagcaaatgtctctgcttcttctagatcattgcaaaaaaaaaaaagaagaagaagaagagaagaaaagaaaaaagaaataggttaagcaaattttgtggtggtgcttatgtgtgcacagacatgcatgaggcctccgcatcttccaaacttggaaagcatattttaacagcacaaatatatctacatgtttgatctacatcagagcctctttttttccctcttccttgcatgcttttaaattatatagtttaaatgttttaactattaaatctgtttggtcttcaagctgtaaacatcacacacagctaataagctttaggaaagaaaaggaaattgacatttagtatagaggttctacaaaaccaatgaaaaccatgcaaatgagctatggaacagagagatttgcatatcctcgttgatttcatgatgatattctcagcatgagcctggcagccttgcctttttacctcttgggatgatgcatgtactggtggtagagccctgcagggtcaatttaacgagtgtaacattgtgattttccatgcggtttctcagaaccactgagcaaaatgcagcaataaccagtgacagaggaaatcgatttttgaagtaaatacttttggaggaggggaagaaggtacattcccttcatatttaatgttgccaaagtaggttgaacaagtttttatattagtaccatttggtatttcaaaataaatagattatccaccatttccatcactctctggataccctcacatgtttaccaccaaaactcctgcgcagagactggtcctcttttgcaaactgcctttggctcccccgcgatctctcatcagaaaagcaggctaaggaatctgcttttgcccccatcctgttagaatgataaatagtagcctgatggccaagttgtatatttatttaatacatcgtctgtattgatagtttatgatgtcctggatatgaatacacgaaagcacagttgcatagtggcgaagaaggattttgatatcgtggagatctggatttgaactcaactctggcagttctccctgccttagtttcttgcccgtaaatgggggtgatgaggtagttgtgagaattaaatgagagactatgcaaattgttataatactccctggaaaatagttaaatacccaatagatagcatcactattttgaaatgctttcaaaattatactcgagttttacttctgcaaaatcaaggcagctttcttcagaaaagagagaaatgaacttcacccctaaaatgtacttggagaattttagagggtcttttccaagttgttataaagcacttctgaagtgaatttgcccatttctgcccacaccaatcttataacattccaggaataaaatctgcactcgagtttaaaaataaaacgggtggaacaaactgaattagaagtccttggcagacatcccccccagcagaatgttctctcaattggtggtattgcaataaaagagatgtatattttttagtctgctcttcctccctgataatttcagccagttgtatttctctattctaaaaacctggtatgcttggatttaatctcaccactcctatctacgctcctgctcctacccccacacccatttcccccaaaaaaaccccacatctgcacagaccctccttcccaagaaaacatggaggcgggctgctctctgataccgtacatgtgcattccggactgtgctgaggaaggtcatagaaacatgagagggctctgctgttgtcagttgtaaagactgccaagaaagaacaacaaaaaaatctcaaatgcattcacatttctcccgcctcttttttcttctgtaaatattcaaccctttttagagaggcttttgataatgtgttatctcagcaaacaccacgaaccttggatgtacgcagtactccctaatcccataggaatgactcagtcaagagagttagatgaaatatggttggcaagattgggtggggaatcttgttactacacacacatacacacacacacacacgcgcacacacacacacacaccagcagcaccagccactgcacccctatcatcgccatagacattatgtaaaaactagacattctcctctcccttacacagtcagttgcatctttcccaaaaatggaaggggaaaaagctttctttggctgagccatatgcaaaaaatcatggaacatctgtgtaagtaacaacatacaacaagacaaattattggtggtaaaaggcaaagcccttgtttcaaaaacatgtctggaaatagtgtgtatacagaaccttcctttgtgctaattactcataataactgtcagctttgtgtaccacaggctgggctgttaataactagtggtcgcagtacggtgttctttttctttccctttctttttttttttttcctatccttccttccctctttcctgccttcttttcattgttgttgcacaaatcatatagccttattccaatagttgctggaagaccaaatcagagatgtgggggattcagggactcgcgacatcttggagtatactagtggataaatgccacttcacccctgatgtggccgtttccctccaacacttgtctaaggagtgcagggactttggggtccaagcaatgtatcagtaaacttcagaatttttttcctaacatttaactctattctcagtctcaacacccgccacaaaaataatgtcactccaggcaaatttagtcgcttacggattctgagtcttattgtgattttgcctgagtggcaagcttttcaggcacgtgtacttaaaaatgtgatgtggtagaatttgcctccagctaggaatccacagacttgggtttgagctccacgtcccacagtcaccacgtgatcttcagaaaagaatcactgaactgcctgtgcctccatgcccccgtttgtcaagagggaggtggtaatacctgctgcggtttttatgtggatcgaatgggcctaaaactcatagaaacacagaatgcttctatgataagagaaaactccagccaggctcagtggctcacacctgtaatctcagcattttgggaggccgagatgggtggatcacctgaggccaggagtttgagaccagcctggccaacatggcaaaaccctatctctactaaaaatacaaaaattagccaggcgtggtggtgggcacctgtaatcccagctacttgggaggctaaggcatgagaatcacttgaacctgggaggcggaggttgcagtcagctgagatcgtaccactgcactccagcctggaggagactctttctcaaaaaaaaaaaaaaaaaacgaacaaaaaatactctgatgctattgctactggttgtttttttttttaatgctaaaaggactccaaacatcctgttatcacccactgtcaaatttctgcatatattttgcagtgccagtgagaaacttggggtctctacagtcagtaaggaaaaaggagtttgaaagaactaagggatctctgtctatggggaagaaatagtagggcagagaatttaaatttagggttcttaggaaatgatgcaccagggccaccgcacagccctcatgtctcctctcttcagtgtcctctctgcctccatcacctagtgaggagggaacaggtgcaggaacaggtcgccagggtgtccagcaggtgacctcccacccccctaccctcgccgcccccactgctccactggcagcctatgtcccaaccaaaccttacttcacattgtaattctaatgttctgtgcgtgttcatcgccatatttccctccatctgacccagcccgtcaaaatccttcctctacttcagggcccagctcccatcccctcttccgcaaagccttctaaccgcaaacccattaacctctccccacttggggcttctgagtccctttattatttatggttaggagaaagcatcacgtcggtctggtgatgtgtagtgagttgtgtgaatgtgttagcagagcagggtggccctgcatgtgatggttgggtgttagctggagtgagccagcctgggttcaaatctccctctggcatcagcttgtgctgtaattggggtaagtgctgaaactctccctgtctcctttcctcatttgcaaacttggcttaataatgatagctacctcaaaaagttgttgtgataattaaatgaatgtcaagctcttggaacagtgcaagcgcttaagaaatattatgttggtgcaaaagtaattgtgattttgccattactttcaatggcaaaaaccacaattacttttgcaccaacccagtatttgctattactagtcctggtcagctgagcatggtggctcatgtctataatctcaacactttgggaggccgaggcaggtggatcgcctgaggtcaggagtttgagaccagcctggccaacatggtgaaaccccgtcgcaactaaaaacacaaaaatgtgctgggcatggtggtgagcgcctgtaatccctactactccagaggctgaggcaggagaatcacttgaacctgggagccagaggttgcagtgagccgagattgccccattgcactccagcctgggtgacaagagcaaaactacatctcagaaaaaaaaaaaaaaaggcctggtctaccagagacaagaggccatgtcttgtccatgaaagccttgcaaccatattttacagatagaaaagacccagtccatgaacattaaagtcagtatcaggtacatttatcaacataaaatctgttcctttgaatcagctcaataataaaagagtgcagctgagcaccccctcccacagccccatgcctctagtcactgaaaatctgtgaggaatttttatagagtgtttcagaacagagcatttcaagacaaccctagagccctatggaatacattttcaatcatctttctgcgtctgctttcttttttgggtgcacacagcagacactggtgatgaggcatgtgcctgtgtgcactgttgttttatagaagctgaatgaaagcctgggagttgtatctgcctgaaaacttccatcctggcttctagagctcaacacctgaaacgctggaggcagttgaggtcactttgaaaacggaacccttgatgttctgctcaaactttagaggcatttacaacaaatcaggcaaatgaaagtgtggaaaaatcagaaacgaggaccactctgtcttagggattttgtcattgtatcgtgtgtgtgtttatgaatgtgagtgtgtgtcacatgtgagtgcatttaaccttcatgcaataagagagtagttttccacttagaaccagccaactctctataaaatttacctccgtgattctaattttgctccctccgccgtgggcaagttggcaatgtctgaatgtctgaagtcatttttgcttgtcacgactggggaggagctaccagcatctagtgagtagaagtgaggaatgctgctaaacatcctgcaacacacaggacagcccccaccacaaagaatcatccagcacaagatgtcaacagtgccaaggctgagaaaccctggtttaccttaaccttaaaagaacaattcgaatgcttgggaagggatgtctgccacatctgtactggagagaagcatggcccccagtcaaggacatggagagttccatgtctggatctagaccgtgtccatccacaaagatgcctcctgctcttctccgacatacaatctggtccatgagaatagactttattggtgagggggcggggctttaggtgagcggcattgaagggcttgttctgagcttggcctctgctggcagattattttctggccactttaatctcgatcctgcctctacttggtctttttttttttttctttcccccagtttttggatcttatagttccacaggacaagatacatctaagagatgggggaaaaggttaaagcagcaaggggatgctggatagagggggagggaaacaagaaaggaaaaaacaagacagagagacagagatagacagagatgtacaaatgggggctgcttggttaaagtgtcctggagttttcagcaagagattttgctgccagtgtctctccatccttctctctgcctctctctctctctctcacacacacacacatacagacacacacacacacacactcggccccaccaccacacacaggccaggtggctctgcttacatacatggcttggcgcttttactccttggctaagaccatttcacacatgaacaacacagcctcctcctagagatttgtcatccatctgcttgcagaagagctgtctgtttccctctgaaaattggtccaatcaacattttcctttggccagggtagcttaccagcagctcctccataaggtccataattgcaatttctcattctcatttgcctggctggcttcacccttctgtcctctctgcaccttcccacaagtgccccaccctccccaccagccctctcctccttttgtgttaataagccctgtcaaaatgaatgacagaatcaacttccttctcccaaaatggctcattactcataaatttcaagcaatattgccttctgtcctcaaaaggtttgcagatttttttcccccaactgatcccctttccagagtgaaatagcggatgaatgccttgcctagcaccctctctaagctctgcctctgtggcagtattgtgggccaatatgccaacgagtctttccttgtgatctgctccagcctgtcttgtgccatatgcttgtggcagacagtggttaatatcagtctgtgagcatcttgaggctagctttgaagtctaattctaatgtcatcatgcttatagggtgcacactttgtttgttctggaacagagggtcatctgctacgggatgtggaacactgaccctgatattgcagccgtgtttgtggttgagtgagggagcaggtgatgggcataggagggaaccaagccctgagccgtgtttcagggatgctcggtcccatcccctttctcccagatgacttcttattcttaaattttgaatagtgagtaacacaagcaggaggtgggatagcatgagaacttaggaaatcttcccatctctttgttacttacaagataaatgtctatactgaagctttagggacccagattacaactgaattgttttataaatgcgtctgaaatctgctgttttgaaggacaaagtaatacctgaagaatgattaagaaggcttagagaatccgcaggctccaaggtgtgtgaataatacctttccatggttcactaccaggtgatctggacctacagccagtcttctgtgtttcagtatattatgttgggagcattcccagacagttaatgcgtaaaatgctattcaaattctcctttaccgaaaggcattttaaagtaatacacgtgggtgaggaatacaagtgcctggtgggatacttttggtaaacaacgtggcacagtgggatggagtagggtctactttttcccaaatgtgaagttagtagctacagaggggtcctgagacagaaagcatttgtaaatattaatttgtgctctgtttcacagaatctgaaatcaggcatctgtgcactttaaaatatgaaagaactaagagatctagtgtttggtagcattttagagggaaaaaaggccatagctcaaatattgctctgatttcagttggctgaatttatgtgtaaagggcatgttagggaatagtctgcaaaggtaccagaaactgccattcatggaaggccctgagtgcaaaatgcagcagtcagtagttctgacccatgccattagatggttctggaaggtcctcagaggagacgcaacaccaacagtgacactgcttccagctcaggcaggctggagctgttctgagtcttcctgaaggttctgaatggtccagcccttggactcccttcagagagtcatggagcacccacatttcctttgcacctgaaacacttctttgtttctgtcttcaccctgactcctcatctattcagagatcccagctgatcctctctttcaaagccaggccagtgagctcttacagaagcttacttcagcattccttccaccgtcttctgagtagcagggcagacagagacagcaatggagaattccagttgattccccataaaatggccactttgttgtggggcatgagctggtctgtacttgtttgtgcctggcagtgcacacactagaaccctgggcaaccctggatgtaaatcaactagatactattattaaatagccgaaggtttgccagtgcagcctggagcaaagagagaggggtaaaatcaggctcccaacagacttccccataggaaacctctcctctgctgtgattttccagatgagctgcgtaaatggctccaaatcaccgaatgtttgtgcacgcaggctccattcatgcgcatgcacacacccggcttgtgtccttcttccctctcgtcccttgaacccgtagctcttgattctgcctgtaggagcaatgatgttgtagcaaccatgacaaaagaaacaaaatcagaaggcagatccaggccgctccctgccacctgccctctgtctaccttagacagatcacttaggcccactgggtcttgataagacatggtcttttcacacctgttcttccagtcttataggattacctggaggatcatgtgatgcgaaggatgtaaaagtgctccaaggggttaaaaggactttatataataaattcctacaaactgctataggcacagccatagctctgaaactagcattctcgtaaggctagtccaatccataagtttcgtttgcttcaagcagctcagatagacactctctgaagataaatgatgcataaaaacaccattgtttgtgatcagaataatcaggtaccactaaatagtcctgcatgtgtatgcatgataccagcagcctccaacttgcttctccaggagcactgtacttaacttggaaacccctttatttaatttctgtccactcacaaagcttcaccttgtcttctctcctctctgtcctcccgaggttaatccttgagagcctgtaatcaaggctaggccctgcccaccttaagtcaccctcccctctctctaggcctccacctcactggggagcgtcattgcagccagtggcaagaagctgcaaaattctctcatctgtgaagagagcccctaaaaccccaaatcccggaccagtagaggaaaccattgctgccctaatatcacatgttacaagtcttcgagcccatggtatctgagatgttaggagctagcattccttgtaattaaacccctggaacatcacaaggacccagttcagggggcttggttggttgactgattgatgacagcatctcaattatgtaggagatttctgtaaagaggagtgactggaaggaaaagaagataaccttcatttatatcatgagaccttgcgtagtagaaggccgtgaggatgggaacaaagtgaaatcatgaaaaacagcctgatgcaaaatgacaaagaagaatttcagggtcgttgagatcacacttgaacaataactgaacagagccagcactacagttttcagacctgatggctaacaagtgaaatgtattcagagagaggtgtgtgattataaagactccccctacccctggtgctctattccactgactgtccctttatgaaaaatgaattctagagttccctttctgaaatttcttacctgaatcagatcagatatgacaattctattttttaaagcaccttactgaaaataaagtgcttttcagtagtaaacctttaagattcctggtttccctctgacttgtgaaaatatgaaagaactgaaattagaccacattggcccaggttgggaaaacagatggcagagataaggcagatcaaagaaacatctctctgtgggtgaaggagttcctggttgtcatgtatccattttttgtagcgttttccctacttgaggaggctgttgtgaagggcaggattcttcactgaatctttattgtaaaaggcataggtgtgtcttgggtggattccagttctcaggttgatttgcttgacaactcttaggaaggaacaattaatactgctgcccctcaactagctagggagatttcactgtggaggtagaagtcggattcactgaggcagaattgccagggcttgagacccttcatgcctctcttttccaagtctctctctccaagaaagggtgaacttttcaagtcaaagagcagggacgtaaataaatgcagttatggctgtcttaggaggatccattcacttaaggcaaaggtcttagaagttacagaagaggagagagaatgggaactactgtggcaccaggatgtctggagaagagaaagtgcgcttactgtgcacagcttcctctccctcacctgcgccacggtgaacccacctatatctttctgctggcaaaaacatttgctcagtgtgtcgccggagtacttgagtgtctgatatttctcaaggcagaatctacctcactgtctctgaaacctcaaaatatgtggccctctcgaaggataacagttggcagcaacctaaggctgttctgctccaacttggaatgaagaggaatatgatttggccattcttcttagcacagaggcaaataaaaaaaaaaacccttatatacttcaaaagatgaagatcttacttcttactggctatctttgcaccaggtcctgggattggcatataataaaaaatgcatatgcagtggccatgaaatgggcttaaaggtcaatcttggctgccagtcgtggctaaactgcattgtattccatgtttttttccatattgcccctgcagtgtacatatacatgcacagtcatggcccctgcacactgtgtacacactcacgcctgcacacatgtatgcatatcaacgcctgcacatgtacttgtatgcacactcacccacacatgtgcatttgtgtgcactcacttctgcacacctatttgcatgcacgctcatctcccacaaatatgtatgcatgcacactcacgccccccccaccctcccgtgtgaaactctgcacctgcttgtctttaccctcacccttgaacctgtgtataacctcataaagtaggaagaagcccagtgttgaactctacagccttttacattcaaaatggttttgaaaaatgcccattcagaggaacaggaaagcaccaaacctaaaaggtctgaggacctttccatgctttctgtctcctaatctcagagctgtaccaatctgttatttaaaaattagtcattatttatccaaggcaggaggggacaaatgtaactgttagttcagtaaatgatttcattcttttttttttcctgtgtcctttctactgttaaagtgacgaaaatgacaccacggtttgatatgtggggttggtttcagtttgaataatctcatccttagctgcatgtgaactcatgtcttctcacactctattagataaaagcctaaaacaggaaggccagaaacaactgtttttaaaaagctcatgctaccctggcaacttaagttggaagaacctaataaataaatacaaagctgcccctctgtcctaatgtacttcttctgaattccagctgggcacctcatggtttcatgcctgaatcacaaaggcgagtgccagtacccagccagagcagttttcctaccataaaccagtaaatgtgtgtgtatcacatgtaagtcagggtcagatggggaaaatcaactacaaaaccgcagagacattatgcaaaattggattacgtacatgttttcagttttgtctcttagcagtttaagtctttaattaaaatacacacgagagagagagacagagagagagagagagaatctgtaactgttagattttataggccccggttatgagataatagccttccaagtaatttttatgggtcattctatctagtggcaacttagactataaagccatctcccagcttcccaaaagtaatgtctgttttctcactttctaataattacttcagatttgaaagtaaggagttgtcacagtgaatacaaattagagtcagcttcagggtattactaaatgtggattgttttgttccgagttttatccattttaggcagagtaacatgatcatttatatacatctgcctctatgcaggctgtgtagacatactcagaacaccagcttcacctcttcagtcttctaagacagtctttctaatactctatattgtctaatagctaagctattgttaaataaaaacacgcaaatgtttgcagttaggctcccccctccattctcaacctcttaagtgatacagacagtaaatgcattttgatgtttatttagaaagttggcatcctgggactgttcacaagatagctaatttgtctgaaggtccccagagacagtgaaagtcatcccaccatctctctagctgccctcataccggggaagtaaaatgcagcatagaacactgcagctcacgttatggagaacagtggtgctatggtgatttcctttctattcaaatcatttagtgaggatttacataatttgcattaacgtgtgactttcgatcacttatgctgcagcagagtattcgttgcctatgttctctaaggcaccagtgtggtggttcatgtgtccttgtataaaagattactgtcctccccatccccagtctttgtatctgtgcaccagaacaaaatgccctcggatcatggccacccaggccagagaatgaggacccacactttaaaaaccctgtagatgataggatgagcggtcctcatccgtcccctccctgagagtgaggttgggttggagtagaaggatggactctgccaaatgatgacagcagccctgagagtccttctcacaggtggccagctctgtcccctccagcctcaccacacattcccctagtacacaaaggcagacccgggcagccactcagcatgcacatgtagcagtgtcccctgtacactggtaccctcaaggcctccctggcacctttgcttgttacgttggctgatttcttcaaagggaaatatgggatgtggtgcagcctggccctcacacactctgaaaatagcactgcccagggccaggccttttcctttgcacactgccatacccaccctggaaagtactccatggttgtatcacaagaaaacagccatttgggcattttaaattactcaaaatattataaaaatatttataaaatatattaatgtatatatttataaaatacaaagagtatatgattaccaggcaaatgagtagacagtgatagaactatcataagaataggattggctattaattataataatgattggaatagataacatttattgaacatgtattatgtgccaagcactgtgctaaaatatttacatgcagcagttcatcaaaagctcatgggaagccatgtgcagtgtcatgcacctgtactcccagctacttgggtggctgaggcaggaggatcacttgagccccagagtttgagcctagcctaggcaacatagcaagaacccatctcaaagaagaaaacaatacaaaaagctcatgacagttgtaagacatatgtaccatcattacccttattcaacagaaaaggaaattggggcttagggtgggtggttaccttacttgtacaaagtcacacagctagtaagtggaggagttggttcaatgaaggataaccagggaagcatctgtgggcatatcgaggcctgaaaataggaacaccttggccaaatttcagaccatgacatcaagcgaatgcttgaaagctaaggaacaaatagaaatatgttgtatcatttataacaaattgttaccattaacacctacaattattagcgttaggagtattgcggtgggaattgaacaatgagaacacatggacacaggaaggggaacatcacactctggggactgttgtggggtggggggaggggggaggggggagggacagcattaggagatatacctaatgctaaatgacgagttaatgggtgcagcacaccagcatggcacatgtatacatatgcaactaacctgcacattgtgcacatgtaacctaaaacttaaagtataataataataaaataaaataaaaaaaaggagtattgcatggtcagactgttcagatctcatgaatgctccctgcttctctattccttctttgatttgacatgtgccaggccatgtattccagtggatttctgtactttctactttattccaaaggctaagcattcctgaaagccacagagggagttgatgtgcttaaggaaagaagtatcgcttaatgtggccaaaaaccgattccatttctgtacaaatgcaaggagtttttgccaggagccagggattaatagtctagaggaagggactaattgtacacaggaacaatatttacttttataatgggaatagtttgagacagtgcatcttctagacacaaacattcagtaggaagggttatgcattaattctttcatttaatgagcattttaagcacctattatgtgccaaatatcttttcgtagctctacaacagtgttcacttctcaatcttttgctacaccagagcgttgggaccatgctcccattaatcaccctgtctcaaacaacatgctttaccttcattcgttgatttactcatccattccttctcatagtttttaacctcaagagctctgaggttcagggtggaataatatggagggcctttgagaggctaacttttgaaccaaatcttcgaggatgaactagggtagtggcaggtagaaaactgcctttatatttagccttctttggtacctggtcatggatttcttcttcaagcatgaatggcatcagttgtctgggagtgagatacagtgttcgtatgctgagaaacagattaggccattaaaaaaaaagttgtggccacgtgtggtggctcacgcctatagtcccagcactttgggaggccgaggcagggggatcacgaggtcaggagatcgagaccatcctggctaatatggcgaaaccccgtctctagtaaatatacaaaaaattagccaggtatggtggtgggcgcctgtagtcctagctactcgggaggctgaggcaggacaatcgcttgaacctgggaggcggagcttgcagtgagccgagatcgtgccactgctctccagcctgggtgacagagcaagactccgtctcaagaaaaaaaaaaaataagaaacttgtaactccctctctctacttgatgaagtagacatcaggaaagactttcttattctgctttccattaaaagccataacttggaaattattattgattgggcttggtgtggtggcttgcgcctgtaatcccagtgacttgggaggctgaggcaggaggattgcctaaggtcagaagttaaagaccagcctgggcaacatagtgagaccctgtctcaaaagaaaatttttttttaagtagcctagcatggtgatgcatacctgtagtcccaggtactggggaagctgaggtgggagaatcacttgagcccagcagttcaaggctgcagtgatctatgattacaccactgccctccagcctcggcaacagagcaaaacctcatctctaaaaaataaataaaataatatcttaggggaagttgacaaaacattagaaatattgtagggttaggtgcctgttgagccccaggatttattccattattcactcatatcttcatgtatccattcaataaatacttattaaaagcctacaccatgcaagataaaagccacattctactgagtatgcaatgatacacggtatggggtttctgctttatggaaactaaaggcctactagaggaattcaggaattccagtgtgtaccagctcggctgtaacacagtgaggaagagataggaaccatgaactaagcggtgaaaatgtgatgggattcagaggggtcagaggtattggatacagtgagattattttaaacgtttagggtgtacgagcaagatgagtaggagatttctttaggaaacatctccctatgaaataaaagtttatataaaaggaataataattacagttgatatttatgaatacttaatctgggccagggactatacttagtacttttcatgcattgtctgattaggtcctcacaacagccctgtaaggcaggtattgtactttcttatattttatagtttgcactattgtgtgctccatggttatagcaaaagctttgtctgtaaaaggccacagggatagaaggcagagaggaaagtagatgtgtgatgcagtattaattattgagccaataaaatctctctaatttagattttttaggaggaagtcattttacattttacattaatttaatctatattgagagatccttctaagaaaataagttgcattacttcaagtatacatagccatataaattattgaccaattttttttttccaattcatagacattactttccagaaactagataatgaccatttgttatcagcacactgactgcaaaatggatgatgaagaaagcctgggttttttttttttttttttgaaagcttggtagttcttcttgtgaataaattaaacactttcctgacgatcctgtttgcattattgacttatatgtactggctcatatgtagctgcccatgtataattctccccactcattctgaagggagggaaaaaaacgattaaaaatttcccctccttctttttcctgttttgagattatttttgctcccagcagaggcgcggaggagggagctctcagagccccattctgttccctacctacagcatgaaggatccagataaccgcagaatgaatgaggtttgagcatttgtttttgctataagtaagatggtttcccattaataaaagtggcactcagtttactttgtcttcgccagacaggcaaagggtaaattaaggtggttacctgtggtgtcccagctctttcccaaggctggactagtgtgagccgagaaccaggcaggactcactcacaggtccctttctctgctacttctgctctggttttatgcgaagccctatttcccagctgcttcgggtaaacaaggacttctgtgttgaaataataaccacttgggctgggcgcggtggctcacgcctgtaatcccagcactttgggaggccaaggagggtggagcatctgaggtcaggagttcgagaccatcctggccaacatggccaaaccccatctctcctaaaaatacaaaaaattagccgggcatggtggcaggtgccgtagttccagctactcgggaggctgaggcaggagaatctcttgaacccaggaggcagaggttgcagtgagccgagatcgcaccatttcactccagtctgggcgacagagtgagaccctgtctcaaaaaaaccaaaaacaaacaaacaaaaaaaccacttattgtttcactgcctaatattaattaattggccaaatttctattttattatattccatatattttaaaataatttcttcttctgttgtacaaaccaagatagaagataatttgcccaagaacacaattggtaggtatcctagctaggaaagtgggtgcttctgaaaattataaaaatgaaatgaggtaattttctgggcccttggtacaatgcctgagatgtcatatatactcagctaattataagtgacattttgttctagaatccagtagctcaacttttagtccattgtgctgaacacaaatctatagatccttaaattgtatacttttattaatttaattttaaagagccagaaaaattgactacattggaaacattccagtccaccaacatattgagtagaaagaaggacaaaggccatattctctttcagatgctacaaattgtgtatattttcagtaagctgtgtctgcttaaggaggcattactgcattcggatagataaactcaaataaaaaggcctgagtgaagaggctctactgggtttagcgtttttttgttgttgttgttcagttttgcatgtgtgtttttaaatcagtttatggttcataagctgatgaagcagtgagtacaagtttgaactatgagaagcaggtttgaataagtctagacatttggttatcttctgtctagcattcatttgtgtcgtgggcgtcacactctggggattagtgtttcattatgcagaagctgttttatctttagctttcttataatagcttaaagtgaattctgagtggagagagaatgaaggccaggccttagtaactgcaagaatcataccaaaatgggttggatgggttttaacagtgaccgataagcattacgacctcactctctgatagttcagttggctcgatgctgtctcatcacctcatttagggtacaatatgctgaggaactgaccaaaggtccctgaacagtgagagatagggaagagcagaaatccgttcctgtaccaagtgtctaacacttaatataggtgagagctggcgtgagattatctgtgctgtggaaaaatgaggacctatcgatacctctaagtatataatcactgccgtgtcacattttaattagctccttgaggctatagaaagaagttcgcttcttatcctccaaattaagcatcacttttacaaacaatcaatgttccattttcaaaaccccaagtagagcaatgtttgattttccttactttccagctttgagaatgtttcatttttagaaatatgttataggaatgtaaagtaactcttgtttccccaaataaccacctccttattatctgttcccctaagctgaatcctttcaaaggaaattttgtcttcaggctaagtttagtggctgatggaaatcaaaattatatcaggtgggccattgcgtcagtaaaaaagcccagaccaccaccacacaggatttttctccagacacccaaacatcatgtcacaaagctcaaaaaagtagtgattaacatgcagtgctttcaggaggcccacattgccgattcagtcccagtatgggctcgtcagtttcactttcattcattcatttatttatttattcccccacccattgattcacattcactcatccattcattaaacatttgctgcacacaatatcactgttagacagactttcagaaatgattgggttcctgtattacagacatgagcccacggcacaaaggtcaaactaagagtaagatggatgtttatagcacaagcctataacaaaaagaatgggtcccgagccgcatcttcttccaaatgcacaaactatatttgtaccttaaaaaaaaaacaaaaacagtgtttccttttgagaggcagcatggtatatgggaagaacacggatttaagaactagacaggcctgggtttgaattctgcatccataatgtgctaactgtatcatttcgaggaagttcttttgagtttcagtttgtctttaaatagagtcatcatttctactttgtagggttgtgtgaggattaaatataaaatatgcagcataatgactggcacatttaaacgaagtgctcagcaagtgctatttcccttcccctttcttcatttctaacatagtttgggaatggtttaggatgactctttttcttcttgtgaatagatagagacctcatcaccctaacactagaaaactataggacagagaccatacttcttgctgtggccagccctcatccactttgatgatgcttgcagctcccaagagagacaacagcccccacggcatggccaagagaggagcaaactctctccccaaggcagtcactctggggatgccattgttccattgccaaactcatgacctttggggaatttggaaatctactactttgtggggagaaaaggacaaagaaagtcaagattaagctttatatgtaaaggccttttattttaatggtgttgaattgagtttggattttgcgtacccttcaaatttcttagggtgtgggtgagggcatcctaggagatttaattagctccttgagcggcactgaagtttgcgacattgaggcacattttcttctattgtccattgaagtgggggagcctggcaatgaaatttctgagaaactgacgctgttgccgtggatagaattgtatggatatttgaatttagtttagtcacttggtggagttttattttgttgtttggtttcttttggaaagagaaaattagtatagtatgaatctgagcagtctggttacatgctttaatgggcctctgagataaagcagaaaaggatgtagtctagtagtaaccctttagatgataagggacacgcaggaggctgtccaagacagtctgttaatcttaatagtctctcacttgttaagacctgatttatttcaaactaaatttcttgttttgagtttccgggtgaaagttctggactgaatccctaaaaacatgcacaacaaagaagaaggcttttagaaaggtttctcctattgacagggttcatattctatagttcacaattcagtgaatcaacatttatattaatttcatccgttacaacctcagaatttgcctacaagatccaatggcatttttactgcccttatttagcaagcctatacagtacttcatgcacttggtcatgtcttcaactaatatttattgggtgtcttccctaagcaagatagtgcgagagagagagctgagttaaaacattcaagataacctcaagaagctgacaatctactaagggagataagacatacatattaataagaacaacttaaacacaaaggacaagatgatatgtggcatatcttatcaattaaataatgttggacttcagagggtgaaggaattaggcatgaaggtatatctcaacagggctgtgaatgactggaaacaaggtcttctctcttcacactgtgagccagccacatccatactacggtgacattcatttctcccccaggccagctatgggcagaagtttaattatccttgaacgtcttcaatgatcctcatctttgcccttgttccctctttatcctttctttctccccaatgtcttaaatcctgatgcagccagggagattttttttttttaaccttcaagaaggtaaaaaactatgccagggcaaaatgccagatcaatgttgctattaatataatcagatataaactttttccagttggcaccaacaaccctgggccttctctgagtaccacctataaacagggcttcaatttcccatttttgcatacttactaatgtactacagatcttgcactgactttaattcaatatcaatattaaagtcatatgaggtagtagtaaatagagatagccataccttagagtcaataagacataaaattagttatgttattattattattaattatgcataatatgtcattttcctgaagagaacagactaatagctgatttcagcaagcatctttaggcttttgttttcaaattattttacatctttttcttttcttttcttttcttttttttttttttttttttgacacagaggtctcactctgtcacccaggctggagtgccgtggtgtgatctcagctcactgcaacctccgcctcccaggttcaagcaattctcctgcctcagcctcccaagtagctgaaactacaggcatgtgctactacacacggctaatttttgtatttttggtagagacgtggtttcagcatgttggccaggatggtctcaaactcctggcctcaagtgatccgcctgcattggcctcccaaagagctgggattacaggcgtgagccactgtgcctggccacccacctattttccatctttagcactggccgttctcattcaaaatacgtactgctacactaagaggagacttaacttcaaattcactttgctccacggatgttgtatatgacctgaatagatgtaattctgacaagcttgtagttcattggaggctcacaatttgaaagaaatgcatgattaagactttagaacataaagaagattctagtaaaacaaatgattgcacccttttggattttttgcatattatctttatgtagggaagggaatgatatgttagaaagaatcctcaaacaggtttagacaaatcactggttgaaccataatctccaaaatatcgctacatcagaaaaagcccaacatagcctctgaggtattcgtcagaaatcccagtgcaagcattaggaaagaaatgtactccctgctcctcacctttgtaagtcagatttagtcttcactgttcatttcaggttctctgcctccataggggtcccttcagcacttgtttggttctctaattggcttatgatagtgggtcttacatcatcaactggattgtaaattccttcagaaagagatgtcaattaagtacacagcagagtcacagtatttcaaaattggaagtcatagtaagggggaaggagggccgctagatgctgtgattcacacggcgtcatagtaagcaagaggccgaggcagtgccagcacccaggtagggctccggtgccaccctctgcttcatcctctgccaagcctatcacgacggtcgttcagctcatgctctccatgcacgtctggtgatttgatgctcatctttgccagcttcagagcatcactggacacatgcccagtcttgaagggttaattttcaagtaccaagcatgctttggacaaactcaaatctgttccttgttttcgctcaacccgcaaccagcatcatcagcccagacgcagcttccccagaaggccagcaggtggagcacagttttgtggaacttctctagaactcgctgtttaaaagccgcaaaccaagacatgtgaggctgtggggtggggggcaaagaagagccccagattctgcacgtctggaagcttttaaaattgtcttacaacaattttagacctacaaaagccagcttttgaaattgcataaacggcaagtcgagttcttttttttttttttttttgagacctagtcttactctattgcccaggctggaatgcagtggcacgatcttagctcactgtagcctccacctcccaggttcaagctattcccctgcctcagcctcccgagtagctgagactacaggcgtgagccaccacgccaggttaatttttgtatttttagtagagacagtgtttcactatgttggccaggctggtcttgaactcctgaccttaagtgatccacctgcctctgcctcccaaagtgctttgattagaggcatgagccacggtgcctggccagcaagtcaaatttttaattagacttaaaatgttggtgctcataacaactacagttactgtggttttttttttttagtttcataaagaggacagacgctaaggcaattgtgtggaacagagcagcttctcggggtaaccatctcctgctgatgtataaatatcggggcaaaactgagtaagttttagaaaataaatgtcaaagcaagtccgagtcatttattccttagcaggaaatatcgatcctgtgacattatttgattataatgactgtttctattaggttaaatgactgaggtatacttaaccagtttaggtgaagaatgaggctcattgcaccatttgattgactaaaccttagaacccatgtattctttttatttgttcagtcaccaatttttatgaagcacctactgtgtgccaaacaccctcttgggtgccaaggtaagaattaaattttggaattaagcaaagcatgatggctcatccatgtagtcccagctactcagcagactgagacaggaggatcgcttgaacccaggagattgaggctgcagtgagctaagaacatgccactaccctccagcctggatgacagagacctcaactctaaaaaacaggttttttaaaattggaattaaacacacttgggttcaagttctacttcagctacttattagttgtgagaaaataaatgtcaaatgtttttcaatttgcataagttatttaaccacattatccttactttccttatcattaaaaccctgaaaaggttgtaagtgacaaaatacgtgatacacacttagtgcctgtcagatgataggcctgagttactgttaacttttttttttttttttaccatcctcatcatgttcctcattctcatcttcttccagggttctcacttgatgaaggaaagtatttaagacaatacttctttaacatacttaataatggaatggatatagaaatgggagaaatcagtgtgaaagcaggctttggtgaggccactatttaaaataactatagtttatttaaaggagacacgaagtaactgagatttcacaaggccccagacccccttctcgaatgttattatcaactcccgtttctgccctgtgatgtcatgagggttgatgatcggttcttcttttattttgttgccaagtacagcagggatatgtgtcctctctattcctgagtggtgaaagttctcttctgagaccacaaaacatggtggcctcaggttctttatggccccacggtctcttcctgcacccctccccaaggggctgggttggtagatattcctaatgttatatcccctgttgttgacacccccatgcccccaatcccgcatgcctagcagatgcaccttaacccaaccactctgggtcagttccttcctcacacagcaagctgctaagaaggttgaagaattactggacttcagataccacatggcaccattatccctggcaggtttcctgtcactgcctgtttctttttcttccaggaggctcatcaaacaggcctccacacaaacagaacatccatccacttcacaggccacccagacgtatccagagatgcccagatgagacctgatttgcctgggttaaccgtgtgtctgcagctcagaccctccaatggggcttctagctacatagtctaatgatgaaaagctactggcctgggatttaagagcacagctttctagcctaactccacaactgtgcccctgggaattttagtctcctctctgcatttcaacttcaccaactaaataagtaccttttaatatctaattgaattgatatgctatataagcaaaccagatgttgtgagtaaaaccagcttcagcatccaaaagttgatacagatacttttgaggagcatgtttcaacatattccttaggacagccttactatgagaaggtcatctctcagtgatttcaatgtgccattggaagaagagcttctgccatttaaatgtccagttaggcactggtggacacagcagtatccttcccattcattccgaccatattattttgaatcataaaggcatatccttagaggagaacatttaaaaaatttaataatgtatttgtttcattaacatgaagttaagactttaagataagggtagtgcccacaacacaatcttttaaaatgaagccaagttaacagtcattactctgtgatctcaggcatgcccattatctctctgagctataacttcctcatggatgatcactagtctcctgccgctgtgaacttttacaaatctgattccatagtacacatcttaagtgttagaaatgcttgttctttggtgctgtaaagaaatagaccttgaacataaatttaatttcctcagcaagaccatttttactttctgcagaaagggtacacttgccagcagttttgccacaagagtacacggaacaaaggagacagggtcattataacctgacgcgtccaccctactgctatgtccagtttccattggctggaatgggacctcacattctgtatttgtcccgaatggctagcagcttagaactttttaaaagcagcaaaagcagaagagaacaaaggaaggaggaagtaacttgtgaaatgctgagaaaggtaaaaaaccttcaaataaggaagaggaacaggctatgacctaatgcttgcttggaccagtataagcatgctagggtaaatatttaggctaaattgtgggagctaagaacataaagtacattgatttctttattacagctagcagatatttaagaatgttagcacaggtctttgaataaattttgcttctaagagaaagtactattaattcctaattagatggggaggaaaatctttgaagaggaacctctactttactttttacattaaggaaatagggtgtctagtaatgccctcaaaagttatgaatgcccggtatccgttaggtttgaactaactgatcttcacattactttaaaaatagagatgactcaattattggttggctgtgagtaaaaccaaataaagctttatttaaagttttatttagattcttgaaaaaattatttaacttgggttctccttggtatgattaatttagagagaaaggaatctgagaatgctgttgacctcatcattccttcacatgttccacttttttagtctctcattttaacttaatgaaggaaagtcatagggagaaaaaagagagagaaaagaagataaggctgtgaagagagagggttgttttaagacctcacgttgaacaatcagctaaatctgcattgaaagcaagagaaatagctcaaacacaggtttatagtattttctttctgagagtgaacattgtgcagtaaaaggtccttcacatgctatggttcatacactggcatttcatgaagcagtagggagcagagttaaccccaccaagagcactgcagtgcggccttccttcccagcccccgttccagcacctctttccatttcccgacttttctttcaccgccagtaaatttaatgtcttcagctgagcactgatttcatgagcgtaaaggacattagcagtacttcgcacatggtatgcacaaatattaggcaagtccaaggacaggatgagctgcaagcagtctatgataagagtcaaaggcaggagttggggttgtagactcctccagccaaccacagcaaccaggaatttggatgcttcggccgccagagtgcttgcaagagttcatctctgaaatcgcttccattccagcgctaacattttatgaaacctgtgcttttcaaacagattgttttattgcttcctgcatcaccaatgtgttttctctttgctcccagctccctgagagcattttgaattatagcacagatcattgccatccacaaggtgcatgacatcacagtggacttgggggaagcaatgtcaaatgagactgagtggaatgggaaggagataggctggaaaatttaaataaaggtctttaggataaaatacagaatccagaatagttcctaactctcactacgtagtcgtttgtagcaaactgctaggactcttggcttttattggtgtgatatagatgcgctgctccttaatggtagagactgtgtctttaatcaaaagttggctacagagttgtttgtgcctgtgatatacttattagtccagagcagatatattttctgtcgtgtgtgctgaggagcactgatgtaaatccacttaatgttcatatcaaactctattctccaggaaaaggtgagggactgaaatgtacatacttgttggctggtcacatttgatattcagagacccaaatgagaaagtcttgcttctgagaaagtacccaaacaccaggacatcttccaagccccacacagtagcattaatgttttaggtgtgcaataaatagtgctgaatgaaggaagaaagtttcccaggctagaaacaggtgagtggagacgtgattattattaatacaaaatctggtgtgaggtgggggtgggaccctctccccaggctgtaccgacagccccttgctctcagtcggactcccaggctgagatccggccactaaagagggaacagtgacatttcacaggaaatgacccagaaaactaacaacgtggagtgtgtgtgcgtgtgtgcgcgcgcgcgagtgcgcgtgcatgtgcgtatggtgcacatgtggtgggggctggggacagcttgaatacaacccagggaccttaactggaggaaagactttaccaggcagactctggtaaaagtcgagcaggaagctgagcgtgacaggaaccccaagggtgtcaaaatgccccctcactcagcatctcttgagtcccatcaggacagaacttgtgcttagtcaggttctggacctgacagatgtgaaccagacgccctctcattgctgggggctctgggagggaaaggtgggatgaagagggcacattcctcccaaaggacaaagcaccttttagtggaaaatgtgaaaacaaaacatgctcagttcaaacaaggctcactttggtccagtacttcctttgttatgttcctgcctcttaaatctttctgctttaaagaactctccaagaaaatattttcagagtatacttttcagaggccctgtggaagccaagaataaatggcctccttttttgggtaaagagtcatatgtttaagatagttttatttgctccccccacctcctgccccgcatgcacacacgttgatatggttaactatcttctgctctgaatcagtattaagaatgggcacagagatgactaaaagccagaatttaccatattatcccacaaagcagtaacttttcaattttaggatacataatttcagcatttttcctatcactagatgtttagagctccctccagtgtctctatattgtcatatttactttgagatttttttttttcccaaagatcctaagaattcttttaaccatagcagggagagtatgttattgtctttaagcttacttcaagaacagaacgtgaaagccagaaatatcacatgcagccccacaacctatagattgtccattcctgctgtctgtgctttttttcaggatgaggagagttttggaggtagaagaagatgaagtggtcagaggatgggactcaggaggggacagggtaataaatatggtatgaaagttgctgcatttaaagagcttagggccgggcgccatggctcacgcctgtaatcctagcacttttggaggccaaggtgtgaggatcacttgagctcaagagttcgagaccagcctggccaatgtggcgaaaccccatctctactaaaaatacaaaaattagtcaggtgtattggcatgcatctgtagtcccaactacttaaggggctgaagcaggagaattgcttgaacccagaaggtcaaggctgaagtgagctgagattacaccactgcactccaacctgagtgacaaagtgagaccctgtcttaaaaaatttttttttaaagagcttgaataacttcctcttcttagaaaacgcataaactctgatgtgtcagctgagaagccgaggacctgggatttcaacctcttgcccgtgtgtttgtgattctggcgtgaaggtgatgatgcatttccaaagttgaacttggtctgctaggtttgggatgtggcagaattctggttcctgccagagtcccagtctttctgagtgtatgtgtgtgtacatgtgtgtgcatgtgtgacgtatgtatttatatccatacatacatacacgtgcacatctacatgtgtatgtatatataatcaagatgttcaaaattcaaagcgctgttttaagagagttaaaaaaaattcactatctacagatttgaattcagactgggttaaaaccaccttcctcctctggttgtcaagaggaaggttttggagttcgtgaattttttctgtggagttaagataacgtttgatgtaggagagcaaagctgcttcccatgcctaattccataaaaagcccagaacctctgaggcccatcttcagccaagcagccttgccctctggccttttctgcaacagtgagacaacagccctgggcacagcgggagttggttctgacaccagatgttctctgctcctggttaatgtcagtgagggctggaagttgaataaatgagaacaggagtggtctgggcccatgtaaatgatcctcccttgaaaggaggaacagctttcatcatttgttccagctaagccttgcatgcattatagatctggtgctaagcagtgggaaagatctcataagtaatgttttatgttctttctgtctctcctcttctgttgttcttggcttgtgggttgtgttcgtgttgttaactggaaaattgctataagccagttgtctcgtaagttttaaaaacgaattagaaaaaccataaaatcctctggcctatgcacattgtccctgttttgtgaaaacattaaagggtaaataaaaaggaaggagaacagtcaataatgtgcatcaaatatattctgagttctagagaaattaatgaccaagcattagaactagaagcaaaaaaaaaaaaaaaaaaaaaaaaaaaaaaaaaaaaaactgtcagtggttggcgagaagtcttgttttttccagccatatagatcaactgatgatatggtttggctgtgtccctgcccagatttcatcttgacctcccatgtgtgtgggagggacctggtgggaggtattgaatcatggggggcaggtctttcccatgctgttctcgtggtaatggataagtctcacgagatctgatggttttaaaaagaggcattcccctgcataagctctctctcattttttgcctgccaccatccatgtaagatgtgacttgctcctccttgccttccaccatgattgagaggcttcctcagccatgtggaactgtaagtccaattaaacctctttcttttgtaaattgctcagtctcgggtatgtctttatcaacagcataaaaatggactaatacgactggtggttgagaaaatgtagcagcctgagatttaagaaacaagtgatccctgagacagagcccttgaccctaaaggggaaaaatattcagttacactcatgagatataaacatagtacttttgttgtaactgctgagaactgaagagctaaaagtcaacattattttcctttttgagactcaaagtgtgtccaccaggagcactcttcccaatggaggcaaaatctgccaaagttgtttttgttgctgtctaaccttagaccatttcatctgccccaactaaaagtcctagccacagctctctcaagcgattctccaccctcagcctctgagtagctgggactgcaggcacatgtaccacacccagctattttttttaaatttttaaattatgttttttagagtcaagggtctcaccttgtttctccggctgatcttgacctcctggtgtcaagtgatcctcctgcctcagcttcccaaaacaccaggattacaggtgtgagcctggtcccccaggcttgacttggcacattgaatcttttatgaagaacaattaatgacttcccatgttgtgtaaagagacgggcaaatgtggcttcaaagcaagtcttgccaaccctcgctacaaccagactgtccctggcctaagcaagcccctcccatgtagacctggaaagccacttccaggtttcaaggatgagttttagaaaattaatggggtactagcatatgtgggtcaactctttattttaatgtaaggacactggacactttaaaataagttttctaatctttttaaaaaggaagggatattttaacatccccaaagtgaaaataatataatatcagagtaagtcctagaaatttaatattatggtacatttactatgttgtctttatttttcttcatttccacggattggccctggttctcagaccagcatgtgggaactactgggttggagtgttagccaataaaaatggccaaaaagtagaccatgaccttctttgagcttttctctggcttgtaattcccgaagctccttctagtgccaaaatacttctccctccctccctcttttagactgtaagctcattgagaacaaggacaatatggtaatcttaatatctttagcacacagtcagatatgaaagagacacatcataaatattggattaacaaatgaatgttctgaaggggaatgtggttgttgccactgtagaaaaggttcaggaaccaggaattcttgtgtaagatgtcatccacatagtcactggagaattccacagttgggttgagggcaaataggaatgccatgatccaggtacctagaactggcttgaaaacttgtaccttgcaacaataaatggaagccaatggccatgtggtctggccatggccacgtggtcagaagagaaggaattttcgaatgaggatagaggaagtagccacggagccctgaacaggggcttgggaggttgagctctctccacctcagagggctgtaggagaaacagggctgtctgcagggagccaaggttacagtctgggttggagagaatgttctgaggaaaggctgaagcaagaagagagctactttttactagattactgtgtattcagagggcagagtggaaataattaatactgagtgaatagaaggacagacagacctaaggataggtgagagaggtctgtctggtgcttctgaaagtttcaagtgtctaggaagcccccagcgttctagtggaaatgcacattctggttctgtcagtctgggtgggacctgagattctgcatttcccacatgctccctagtgatgctgatgctgctgggctgtgggccatggtgaggctagcgtttaggtcaaggaaacaagcatcttcagaggatgtcctccaggagcccaggcaacagttagaaggtcaatggaaaattctctggctgcagctgatcttttctgcttccctttagagcagggaatctcaacagcactgttgacatttggggcccagatcatcctatttggggaagcagggagatggagggggtggaggtgtcccgtgcattgggagaaatttagcagcattcctggcctctatgcgctggatgctggtagcacccggcagttgtgacaatcaaaaatgtcctcagacacttccaggtgtcccttgcagagcaaaattgcttccggttgagagccagagggttagaaggagaattatgtgtcttccctccccgcttgctgccacctccacctcttgtcttctagaaccatgaggcagaaatgacttaagtctgatatgcttggaacgcaacactcttttcgctatttctgtctttagaaatgttgagaaagtgtttgcctttatttgacggcctgattactttaaggtgtcctcggcatagaccagtgagcgccttggccctatttgctgacagttttaatagaacagcagggaaagtcctttccaagaaagtgttggctacgtagcctaacgtcattttaagtcatcaccatacacccaccaaacctctgagataaaatggaaactccatcatctcttgccagggtaatggtgttagtaattcactagtgacctctaagaatttctctgtgcattcactgccacatttaacttttgttacacggcctccaaaatgttttccagccacaaggtcagtccattgacaatctcaaaaatcctgacaaggggacagatgggtttagtttttgcctttgtgatggttagttctgcttaatgtgttgagaaaacatctgaaggttttaaccctggctggagtcgtgagacggaggcatgtttaatggaatagcacacgatcgtcctctcatggtgagtccacgttggagggcccaaagacccatgttgtacaatcggttcaactttttctgaaagccaaagaaaacctacctccaaacaggatttagtctcaagctagagcaaaaatgtacatcatgttgaaaagtcttctccaagtgctacaattcataagcagtgttgtgtttttactggaaaagcttgccatctagccaagcattcttcacatttttcccaggatttagtcataaaatcattttagacatattgcaaggataaaatgtgtacatatctgataaaaggcagggatttttttcttcttttttgctgtataactcctggaggaggcgaaaaacaaactagacacacacatacacactcacaaaacacacgtatttgtgcatatgtatgtgtatatagagagtgcacacatgttcatatatatacgtgtatatgtgtatgtatatagtttgttttccccctcatgaaatgtgtgtgtgtgtaaaataaactctatacacatatacatatatattattttcaccattaagtgcaagaacttggattctttattcacgattacttctatttgaatttaaattagatgccttaggcttctctttgggtttgaataacttagacacaaagtataaaacacttcctaatgatgcccacctgcctaggacatctttaggaattcaggtggaagtgtgtttgcatttgatttatctaagacgttgcagcagtggggatgtaatttctgcctttgggcaggaagggagcttagatggtggagttcgtatttgtaaacgtagatgtgggtgcctcaaagttggctgcgttgctaactaaaggaaggagagaagtgagcccagatgttgaccttttgaaaaaaaagtcccattttcatgacagattggcataaaagcaataacctgtggtaaagtctaaagaatacaagatttggatttctggatttgagtcctgtctatgcaacttactagatatgtggccttggacagatcacctaatctcacctgtcaaacagggacaatgaaactcaacatagcaatggttgcgaggagttaatgaggtaatccgtcaaattctgtggccgtggtgaaggatgatacaaatatccagtggcgtttttgttcttgaagatagtattcttgtgtgagttcttgccaacacacatacaattacatttctgagtcagactgatttcagtagcagataaacagagggagtaaatcagcaatagattagttggaaactctggacagcaatgatttggtggcatatggcttggtggtatgtacctgcacatgtaatcatggaaagttgactattcctactgttctcccctagttctatttcacttaagaaaaagttggaatggataccagcagtgtgctgataaaagtttagctactactggcggccgggcacagtggcactttgagaggctgaggcaggcagatcacctgaggtcaggagtttgagaccagcctggccaacatagtgaaaccccatctctactaaaaatataaatactagccgggcatggtggtgggcacctgtaattccagctactcgggaggctgaagcaggagaatcacttggaggtggaggttgcagtgagccaagatcgtgccattgcactccagcctggatgacagaacgagacttcatctcaaaaaaacaaaaaacaaaaaaacaaaaaacaaaacaaaaagtttagctactggctcgggaataacaggacgtttgatttgtagcatttactgatttctgtaatataaatactctcactgtgactaatttcaaactaccaatgtgacattaccaaccatgagattgtaaagagatgcacagtagcacaccaccatataggacagtcgtgcatcacttaataatgggaatgcattctgagaaatgcatccttacatcgtccttctgcaaatatcataaagtgtgttcacccaagcctagatggtacagcctgctacacatctaagctatataatgcagcctgttgctcctaggatacaaacttggacatagggttacgattgcctacagcactcagcaccttactgtactgaatactgtaggcacttgtaacacaatgttcctaaacatagtttttgtgcatctagacatagaataggtacagtaaaaatgaagtagaaaagattttaaaagggcacacctatatagggcacttaccatgaatggagcttgcaggactggaagttgctctgggtgagtcagtgagtgggtggtgagtgaatgtgaaggcctaggacatcactgtatcactgtaccccactgtagactttataaggactgtacacttaggctacactaagtttgttttttaaattgttctttctttgataataaattaaccacgctcagcttacttttttactttataaactttttaatttttaaaaactttttgataactttcataatagcactcagtttaaaatacaaacacattttacagctgtacaagaatattttctttctttatatctttattctataagcttgtttttgtagaaactaagtctcactatgttgcccaggctggtttcgcgcacccgggctcaagccatcctcctgcctcagcctcccaaaatgctgggattacaggtgtacaccaccacatccagtttataagctttttcttattaaaaaaagttttttttttttaagttttctgttaaaaactaagacacaaacacatacattagcctagccccacacagggtcatgatggtcagtatcactgtcttctacctccttatcttttccatctgtaaggtcttcagaggcaataccatgaatggagccatcatctgcgatgataacaatgccttcttcttgaacacctccagagggacctgcctgaggctgtttacagttaattggcttttttttttttttttttttttttttgagacggagtctcgctctgtcaccaggctggagtgcagtggcacaatctcagctcactgcaacctccgactccctggttcaagtgattcttctgcctcagccacccgaagagctgagattacaggcacgtgccactatgcccagctaatttttgtatttttagtagagatgggtttcaccatgttggccaggatggtctcgatctcctgacctcgtgatctgcccaccttggcctcccaaagtgctgggattacaggcatgagccactgcgcccggcctacagttaatttcttataggtagaaagagtccactctcaaataacaataaaaagtatagtatcgtaaatacacaaaccagtaacatagtcatttattttcactatcaactattatgtactgtgcgtaattgcatgtgctatacttttataggactggcactgcaggacgtttatatataccagcatcaccacaaacatatgagtaatgtattacactattacattggacagctacagcatcagtaggcagtagaaaattttcagctccattataatcttatgtgaccgctgtcacatatgcaatccgcggctgacccaaatgttgttatgtggtgcatgactttatatccactatacaagtagatgtaattaacctcagtcatacagataatagtaaaatagagtaaaatgagggatgatgatgagtttttgtttttgttcttgtttttttttttttttttttttgagacggagtttcgctcttgttggccaggctggaatgcaatggcgcaatcttggctcaccgcaacctccacctcccgggttcaagtgattctcctgcctcagcctcctgagtagtgtgattacaggcatgagccaccatgcccagctaattttgtatttttagtagagacgggatttctccatgttggtccgactggtctcgaactccccgatctcgggtgatccgcctcgcctcaggagtttttaatataatttattaaaccataagtttatataagttaatttttaacattggctatgttgaacgcttggctgtcaagcttaactgttagctctcacagacctggctccaacatgctactgtttctccttggctgtgttacagtacaaagttataccatgaattagcaagttcaggaccatcctggaaagccagcgtggaaaatgcagtcataaatggatttttatttctgtggactttggactggctgtctactcttggtctcacattctctactgcatatctctttggctaagaaaattagtattgaaaaatggtttatggatctagttattggagctagtattcaactttttagttacttaaaagataggacttaaacagagctgaattttatagggtcttttattttcttctttggtccttaagagaagactgcagaaaactagacaagaggaatttgaatgttctcataacaaagaactgataaaggtttgaagtgaaaaatatgctaattaccgtgaattgatcattacacaatatatacatgtattgaaacatcatactctagcccataaatataagaaattatcagatgtcaattaacaatggaataaaatgaaattaaattttaaaatgaaaacattctagaaaatattcccaagaagagatttatttatttatttttctggctatctatccttaagggttcgggaaaaaatggccggtggagaacaaaagattgaaattttagctcattcatgatgcacgtgaccgggaaggagtgttaagatgtcctgtacttccttccataatcacaggttgaggtgagggttgcctaaagtctgatcagccacattttgacagtggagactcagaggcctagttaggaacacagaaggaaaaatgttaaaggcagacctttataaccaaaacaatcaacaggtctaaaagccaaagaaaccagtatttcagaattgttaacttactcctagatgtgtgttaggcatcgggcttatcttaaagaagtgtcttagaccacagaaacatagacccatgatatttggaccaagcataggttaaaactaggggagggaggcacgaattacaaaaaaaaaaaaaaaaaggtgattccatgttagaatcccatgttgaaaaggtattacactttattgtaatacagacaagatttcactgtgttggccagactggtcttgaactcctgacctcgtgatcctcccaccttggcctcccaaagtgctgggattacaggtgtgagccactgcgtctggcctaaaaagcatattttaaaattagtcacatatggaagctaagtagtgcattttgtgtttccgaacaggacttaaaacgtcagtgccataaacactggtatgtattcagacacactggtcatatgtcatgaatttggtagacatatttgtaggcaaataatgtagagatagagtcacatattttaaactaaacaactcactatgaaccatcatgatggttcacacctacaattccaacactttggaaggccaaggtaggaagatcacttgaggtcaggaattcaagaccggcctgggcaaaaaagcaaaactcctctctacaaaaaaatttaaaaattagccgggtatggttgtacatctctgtagtcttagctactcaggaggctgatgtgggaggattgcttgagcccaggagtttgaggctgcagtgagctatggatgtaacccagaaagaccctgtctctaaaaaaaataaatatatacaataaaataaaaataaattaaaaatttaaaaagccactgtgattcttctctgtgatcattcgtaagtcatacactattttgtgtgggtgaaacatgtgatctgttagtgggtctgagaaaatcatatttattaagcaaaaaagtcaatatgtgcttgtgttttgcttatgaatttactcgaataaaatgtctgaaggtcttgaaacttcttaaaagaaaatggttcttacttcattttggtgtgtttacattaaggggagccatgtgacctcttatgagagttactgtcaaatttcaagtgcatgggcattgcctggaggacttgttcaaacacagattgctggaaagcccaagaatttgcatttgtaacaagtttacaggtgatcatgatgccgctttccctgggtgactcactttgagaaccactgtcttgtgagtttagagataaagaatggttgaggtcgtgtgcgatggctcatgcctctagtcctagcactttgggaggccaaagcgggtggatcacctgaggtcaggagttcgagaccagcctgcctaacatgatgaaaccctgtctctactaaaaatacaaaaattagccaggtgtggtggcgggcgcctgtaatcccagctactcaggaggctgaggcaggagaatcgcttgaacctagaaggcggaggttgcagggagccaagattacaccgcttcactccaacctgggctatagagcaaaactccatctcaaaaaaaaaaaagaatgggttggaaaaaatgtctgcacatcagtaagcacaaaataaccattgataaatagcattacaagcatccaggatcctaacaggaggggagaaaatcaggccactttagaaacacttttatgactggcagttatccagtttgctactaaggtcaggtctaaaagattgttaagactagcctgtttctgtatccatgggtatcagctggggaagccaagttctgtctttgtgcttggcagccctccccaatgccatgtctctgctgatgacattggaatttcctccaaattaaacagcctgacagcagccatctgtaaagaaggcagcaaggttacgagtgatcactggctagtgccatttctgctgccaaccaggcaggcaaagcttctggcatgttcttgaccacctctgagaagagttgatgtttcctttggggtatcatagagtttctgccacccagctctgtttctctgcctcctggtgcctgcccctaattattgcatagttgtcactgatcctggtaacctgactgctggatttttgctccagaaacctacagtaaaggagaccgtaggccaccagaagccaggaggaaacatcaggctgcagtcaagggcactgccttctcccctccaggctgctgggctttgagggcagagaaataaaaagactgaaagggattagaggcctggagtccacaacaaagccctgtagtcatccaccaccttgcacagcctcttcctgccatgcttacaggtgaaaagtctagttcataggacacattgcttttccagaaccttccgctgccttccagagccagcattcttcctgaaaactctctcttgccagttgtttgccttcagagttacagtttaaaaaccaacacttaaactgatatcctctgaagaaaaaaacagataacaaattcatgaatcatagttatacttaaatttcctccgtcacagagaaacatgttatttttagaaagtggatcccaaacctaactgatcagaatcccttgggggaaatgtttttaaaaaataccattacctgtgcactggcccagaaaatccagggccattagagactgcaaatgtctgagaatctgtgtttcctaaaaggcacaatggtgattctgatgggcagccatgtttgagaacctctgattgaattgtgcacaattttgatggtgctgctgttgcattataggtaattcaaagaagagcttcttttttttaaaaaaaaatagtaatctataaatataatagttttcatctgaatagtgttttcttgttttcagaagaccttcataactttttttttttttttttttttttgagatggagtcttgctgtgtcacccaggctggagtgcagtgacgcaatctcggctcactgcaacctccgcctcccaggttcatgtgattctcctgcctcagcctcctgattagctgggattacagacgtgtgctcctacgcccagctaattttttatatttttagtagagatggggtttatccatgttgtccaggctgatctcaaactcccaacctcagatggttcacctgcctcggcctcccaaagtggtgggattacaggcgtgagccaccacgcctggccataactattatctttgacaattttcctgggaggtggatgacaggacctgttactgacgccagtttacatctgagatgctgcagtggagaggaattggaactagaaccgacacttacggcttcttgtctggtgtactctctgctgttccatcttcattgcttgtgtgcatgcgtgtgtgtgtgtgtgtgtgtgtgtgtgatgtgtttatttgactccttgaatctatgttgtcttgtttttcgtaaatggattaacgccactaccacggatcatcagggagatatgacgctagagatagataagccaaatggaggtagaaaatccaaactgaaaacagggagagaagctaagatagacccaaggagtctaacaacccaagttctaaactagagagaaggccactgttcatctatttcagggatgggcagttatggaaatagtatgaactcaggcatcccaaaggcagtgcagtgtatgagagaaagatgcttgcatgcatactcccagcaaagctctcagtggggcccaagatgcagggcatggagggtaataaagattagccaggaaggtgataggacaacagatactgaaaacatggcaatgaaaaaacatcagcattcagaggtgagaattaccattgccagaagttcttgggaagtaaaacaagtacagagctatgggtcaaggatctcacagttagagtactagtagcagtagggtggacttgagtctgtagtttgggaccagctgctaacttaaagcctgggaagctcgtgttagccagacattacagatactttttatgtcaccttgaacaagcttcactatccttatatttaaaataaggagtaggcctattaataatctgtatgtatttcttgcagtaaggaaatctaattttgggaaatgaatagcaagaacatagcttggtgcagtgagtcagtgagaggatttacaaaaggtgaacgtacacaggactcttaatactgatcctgggctagtcatgtcattgcacatgacacctgctgttggaaggaacaggttaagcatttagttgtgtgcaatgaacctgtgagccctgtgggctggtcccacttatttgaaatagaacgattgcagtgcctatgtgagtcagggtacacctgaatgtttagttagtgctttccattaacccttttcaattttgcttctatgttttcttttcctccagaaggaaaatgagcagaaggtgtgtcacatgctcgctttttatctgctgcgtagttcttgtagtgaaaggattgtcgataagttcagaaaccaagactactgctgcctccccttcattcattcagtagtcttacagcctaaagaagacaagaaaattaaggactctcaaggcaaaaggaagtcaaatgaaattgggaagtgggtctacagtaaatgcaatatctgtcgctttcttttagaactgcataaaccacatggaaattttccgtgtatatttgctaccaagggatgctatcatctttttctttccttttttttttttctttttttttggagatggagtctcgctctgtcactcaggctggagtgcagtggcgccatctccactcactacaacctccgcctcccgggttcaagcgattctcctgcctcagcctcccgagtagctgagatgacaggcgcgtgccaccacgcccggctaatttttgtacttttagtacagacgaggtttcaccatgttggtcaggctggtctctcgaactcctcacctcgtgatctgcccgccttggcctcccaaagtgctgggattacaggcgtgagccaccacgccgggccactatcatctttttaatttaggcacatagtgctcaggaaaagacaaggatgatggatggtaattaagtaaatgaagacagcattggtcaggagggcagtataaacaaagtaaaatagaaagtctcttgttctattttttttaaataatgataattatatatttcttacagtcatatccagagcttacttgaatctaaagcagtatttatctttgcagcaagcctatgaattagctttacagactgtaggatgcagagacccttggattagaaaagttcagtaacccatgagcagaggcatgagaatgttaaaacaagtcactaaaggtcacatagcattccactagctgggctgtggttagcactcatgacctcctggggtctcatcttttctgaatcttattgaatcatgccagctttctgatatggtccataaaatgctgatagaaatcacatgtgaagttcccaactgtgaggacagcagacttcctttagaagataaatactagacctaatctaatacactttatttgacgtagcagaatttctcctgcatccttatttcaaaagcatacctgcctgtggtcttcccgggtcttaggagagtccatatgtctgatggaagcagacaatctagtgctactcagagaaaccaccacttgatcctcagtttttttgaggaatttcatgtgtttttatgtgaagaatcactctcaggaaagttctgtattttggtagcagagatcctgtcaagaaggcagtgagatagatacacataataagctgttcatcattactgctgatggaactcttcccaggcctgcagctgacagcattgcatgggacctgcagcccctttcaccgtgactgcagattctttggttaagagactgtcagtggtcaaggctctgccccggcttctcgggatcttcacactcccctgtgcatagtaggctttgggttattggccatcatgaaaaccaagattgtcgtttaatgatcacatctatggacttggggtcggaggaacctggattcacatcttggctcctccactgactggtaagttgcttagattagttgcttttttcctctctggctgaatttatgcaattgggagttttaaaaagtatccactaaattcattgttgttgttgttaagatttagttgtgtattgtacactacctggcatgtagtggatgtttggtcaatggtaactattaaaattattgcagatatcctcaggtattatatttttgacaggagatatctgatagcctgattcgatattttatgtggaaggaagaattaaatacagaagaaccctaagacaatgctatctgttctagagagtgtttcgttaaagttgcagtgtttcataacgaagcaggcaggacggccctctgctatgcagagctctcccgctcatgacaacacaacaagcactcccggttcatccctacctactcatcccaacaatgtttccaagttgttttaaggattcagaatggccccactccttttcagatgtccctgggagggtaacccctgccttgtttgagaatcacgagcaagcatagtctgagtttgacttctgtacccaagtagcagggcaccacctccctctcagtggctgatggagaggtcttccacagtgaactttcagtgaagaagttcatgtctctctacattatctgttttactcagcattcagagatatgtggtgcctccacaggggccatatccaggctttctgatgaccctatagggagcaatggcaatttaatgaggaggggaaaagatcagcttaacctagcttctacttcatccgggttctcatggttagttgagagtgctgatccgtgaccaccattgagtcattgatctcccgctcttcctagtcaatctgtcattcagagatttgcttgatcccttgtgccagatgcatgtatttaacaagctaacatgcactaagcatctgctatgtgtcaggtactattagacgcatcatactacaatgactaagacacagtccttgtcctcaaagaaatagtagccctgggagtaaaaatgatataggggaggctgggcacggtagttcacgcctgtaatcctagcactttgggaggctgaggcaggcagattgcttgagcccaggagtttgagaccagcctgggcaacatagtgaaaccccgtctcctttaaaaataatcaaaatatttttaaaaagtgatttgaaggagtaacatcctgttcatgttcagaggcattcagcctatgagcccaaggagttacgctcatttctctctatgtacatcttttagtcctaatatgcgtttcttcatttcttttatttttgttaccattatactctttacacaaggtccttcaccagagacctgttatcagtgtcagagacccagccctggtggccttgtgcagcagatcagaataactcaaggagctcccacatttgctctcctgactttctagaggcacacgatatccacatatgttaatgtattggttttatcataggtttctccttgcatttctttcatgtaaaagtgttaagagttcagtctgatctgaaagcaaaagtttaagttctcagcataactattcttacaatcttgtgcctttgcaaatatgttaaaatgttctcagccccctccagtcctgaactccccatttttttatggttaacgcgctgtcaccactacccagcagactacaaagcagcagcaagtgcaatgcagagaacgcgatgtagatcttgttcaaagcagctgacatgttgtcatctcaggaagggcagaatggcaaggaggagtgattgatggaaacttgatggagcaaccttcacttaattatttttgcatagattcctgaattgtggcttctttgctggaaaaaataataatgatcctgtaatgcagactgctttagaggctggaatgtgtcatcgtatgtgaggattaccacttgctcttttagaaccccaagcatctatctctacctagaaattttttatcgtgaagactaatagccttaagggtgaaggagaggacagagaccctaacccagagtaagataggaatgattaggaatgattgttggtgataatcagatgaacacactgtagccctgtatcaggagagaaaatgtgtttgagattagcacgttatcagaaaaatgtttgcacttatcttattctttgaataagttgcaagctatttctcttctttcacaaaggcaaagtagtaagccaaacctgtaatcagaaaaatattgatatgttagatagagaaagttatttttgtgtgtttgtttcagttgttgaatcaactggtatgtatcgagtacctactgcatgtagggggattgtagagaactttcagcgtcaagttagagattttaaactttatcctagaagtaaaacgagaaattaaggcactgagttagaaaggagctagaccatgatttctcccatatctcttgtgcaaatggcactagccaagccagaagcccctatgctgttcctccatgtgcccctgcccagccattcagcagccttggtgctgagtctgcctgggacatctcccctgtccgcctcctcttctccatgcttactgcccctgcagcaggccaaacctgatgacagctcagtggcattgcagcaagttcctcccgactgtttgccttgcctgtagaacctggtcccttctcatccatcttctactctatgaccagagtgacatttttaatcaaaaaatgttcctgcctaacccttctgagattctccataccttcaagagatatcttggggagagaagggcactcgttacctccttcctcccctcctggcatgccatacttgtgcttccctgaatgtggcatgtccccttatgtgactctgcatgagctccctcctctgtctagacaatgttccctctcacatcacatgcagtcacacattcctgtgtactcttcaaaactcaaccctgccatcagctccaaggagcccaccctaacttttccctcctggtctcactgagccactctgtgcttcccacccatgaaactcatatgtaagatttttagtgtctgttctcttgaccatctctgcacactggatacagatgtattagtctcttctcacattgctatgagaactacctgagactggataatgtgtaaagaaaagaggtttaattggctcatgtttccacaggctgtacaggaaacatggctggggaggcctcaggaaacttacaatcatggcagaaggagaaggggaagccagcacgtcctacgtggctggagcaggaggaagggaaaggggaggtgctacacacttttaaacaaccagatctcatgagaactcactatcatgagaacagagagggagaaatctaagcccgtgatccagtcatctcccaccaggcccttcctccaaacactggggattacaatttgacatgagatttgggtggggacacaaatgccaaccatatcaatggagctccttgagaacaggaactgtgtcttttagatcttctgttttatatgtctgatgcatagtaggcagttggtgatcactcatttggtgaatgaagtgttaggctgaactgaagtgggaatgaatatgaagagataccacacacctgcattccttgctatctgtgccatttgttccatctcatatctcatggtcacaccagtctgagcaaggtcagatactctttttagagaaccttctgtggccttattccatgttcagttgtttaatcacgattacctttatttttgtattggtccatgtcctgagtattttttaaagcattgactgttgtggatccatggagaagtcagagaaaacagatgaagctctctgataggaaaaaggattgaataatcttgccatccaaactgtggtatcaaaatatgactatatatgttgcaatcaggtgcatgcgtttcttggctttcctggatgtgcaaaatagaattcaagacagggtacagagagaacacattctacataccccacataaccttggcatgactgtttggaccttgctggtaagaagtggcattggctagtcttttgttcacaggctggcaaggttgctcctgattttctctttacacggataattcctttactgaccaaatctcatgagagcaaagtgaagtatcctgtagctggcactacattcatgaccttttctatgacaggttaatcatttctttgtgtgttcactcactgacctttacttcattggccaaaggagtgccccatgtcaaagtaatgtcctcgttcctccattccatcatccctttggggcagaaaagatgctgtcttacccgtttttgtccccagactagctgggtgcctggtgtgtagatgttaaatgaataaattgtttaggcaaagccgttagtagcatgatctaatgaccacaaacagaaaagtgtgtgtggtggggaagggcaacttatattttaagaattgtgttttaataagtggtgaattatttcagtataaatccagtattatcattaataatagataaatatattgagcatttaccataagcaccatattctatcgcctctcccattacgtgaaagactaagttttatagtttgaaaagaaggaaaataggaaatatataactacatttaatattatagcataaagggctcaagtggaatgatgctggtatgacagagtattcccaacagtcctcccagttctttttacattaatataaaatgttccatgaattaaagaaaaatatagcaagtcataaacatttacaattctctttcctcaccatctaaggaggacaagttctgtgcttatttagcttgctattccttgtgaggtcagaaaggtcaatgattaaacttagattaggccaaattcctccttaagagaagatatggtgcggggtagggagtggggaacataagaacagccattatagggacctgtaagagaggagggcgagatgggaggaagagcaatcgtcctgggaaaagggaacttgggacagagaggagtaacaaggctttcagggagtctttctgagcatggtgccatgctccctactccccacttccaccctccccactccccccctcccattcacctctgccatccaggccttcccaggaacacttggccaagacttgcaagtttatttattttttttttagctcatcagctgtcattagtgatagtgtcttttatgtgcagcccaagacaatttttctccttccagtgtggcccagggaagccaaaagattggacacccctgctctagatgtgagtcttggatgaccacccttcactctacctaggctacagtaacagacgttgaaagtcagcatcttcattgttatggaggaatggaaatgggataaactattttaaaacaattttggatttaaaaaaatagtttaaatattcctgttctctcaccccacccacccctaacttctttgcattattaattttcttagctaatcttatttctaaaaaagcaaaaccttccaagggaattctttttcttttctttagggagagagtctcactcttgtcacccaggctggagagcactggcacgatcatagctcactgcatcctcaaacttctgggcccaagtgatgcttccacctcagcctcccaagttgctgggactataagtgcacaccaccgtacctgggtatttttttttttttttgagatggaatctcgctctgttgcccaggctggagtgcagtagtgtgatcccagctcactgcaagctccgcctcccaggttcacaccattctcctgcctggctatttttttaagcttcttgtatagatggggtcttgctatgttgcccaggctggtcttaaactcctggcctcaagggatcctcctgccttggcctcccaaagtgctgagattagagccataagccaccaggcctggcccaaatgaattattaatttgttttgggtagaattactaatagccaattactagttagtggaacttcaatttgggatgtttttatctatttgaataaactttcattctgtataactccatgtctaaatctataaatgtagacatacatcagtatagaaacgtcagtggctcttagattgggtactttaataataactctccatgactgaccactggggacttctcaaggagcaggagaagtatctaccaaacgtagatacctgagaaatagtggagtctgctgtaatgttcactgtggataacctgactggcagagttgtcccttctggaagagaggcagctcaggtcactgtgtaaggcacctgtcttaacttgcaatgggaattttgcagtcaggtgaggggcacaatatatgtgaagaggaagtgaatgttgttgatagcatcacatcataattaaattccagccactggatgatgaagtcattccttcacacacaaacggcattatatgcctgtaatatttttccagggctgccattacaaagtgccagaaactgggtgacttaacagacattgagtgtctcacagctggggggcctggaagtcagagatcaaggtgtgggcagggccatgctccctgtgaagatgctcgggaaggatctgttccaggtcactccctagcttctggtggctccttagcatgtggctctgtcactccagtcctcacagagcactctgcctgtgtgcctgagtccacatttccccctttttttttcatgatggagtcttgctctgtcacccaggctggggtgcagtggtgcgatctcacttactgcaacctctgcctcccaggttcaagagattctcctccctcattctcccgagtagctggaattataggcgcccgccaccacgccaggctaatttttgtaatagtagagacagggtttcaccatgttggctagactggtctcgaactcctgacctcatgatccgcctgcctcgacctcccaaagtgctgggattacaggcgtgagccaccgcgcccagcccacatttccccttttcacaaggacaccagttctgtcagattaggaacccctctcctccaggatgacctcatcttaactaattatatctgcaacaaccctatttccaagtaagttcacattcagaggtattaggggtcaggatgtcaatatataaatttggagggacagaattcagcccataacaatgcctgccagtggtagttttttgggggtcagggtgagtctagtatctgcattttcaacagcatgcctttttggggagatgagtgtcaagcattcactgatttgaggtaacggggccctcttgagtctgtgatgtaatctcacactcccctaagagctatttatggcctacaagcctgtgcacatttgaatgcgcgtgtgcagaaaagacaatgagccagacaggcttctacacccacttaagagcactcacatggatcagtcacccaccctgaatgccacgttagttttgacatctgaaatgtgtctggcattttcaggcagagaaggcttttaaaaaaaaaaaaaagtcacatggatgccagttccttactatctccctaaaagagcctaaacacagaaatccagacacaggaactcacaagaatattagataataaatagccaagcttctgaagaggcctggaaccagagaatgatatttaagggttattaagcttaattttttgcactgtggtctgcctggcatatagtagacactcactgaaagtttgtgaacagatgactaggagagtctctgttccgtgggtatgaatcttaaagatgcatgtattcagccccttctcctggcttctgttctaagcagagggaatctgatgccttgtttctgcgcatctgtgatctgggcagattacagatgtcacaagccagtgatgtacacctggattgcatcctgaccaaaatcagggaagtacccgctggcatgttgaggacctcctttgaagaaaatcctgtggctaaaccaattcattgcccttgggagagaaacattctatagcctgctgggtggatgtgtacagtccatgtggacccacctaagtttcctattttgttccttctttcttgttttcctttccttcctcttttcttactttttaagccacttattgagtttatcctttcaaaactcatcttgaggatatgttcaaaaatgacccatctagagcttcctgtacacttctttgcagagtgagttgctgctgacttatttctccttccagcgtcttgctgatgcctctgtagagtcatttattacctgcgtaagagtgacctctacacgtgcctggttcccaacaagacatggagtctcaactgaattttactcatctctgtttccctaatacctagtgcagtacctggttagcacttcctggatgttcagtgtatggttattgaatgaatgaatgaataagctgttactttctgcttgcatagcactgttctagagtgtcatggaggacacaaaggaatagaattgatagtaggtcattcttcagttgcgttgcatcacaagggtaaaacgtgtacttattcaaaataagtggcataataataacttcttaaaatttttattttatttttccgtaagttattgggatacaggtggtatttggttacataagttctttagtggcgatttgtgagattttggtgcacccatcacctgagcagtatacactgcaccatatttgcagtcttttatccctctccccactcccactcttccccctaagtgcccaaagtccgctgtatcattcttatgcctttgcatcctcatagcttagctctcacatatcagtgagaacatatgatgtttggttttccattcttgagttacttcacttagaataatagtctccaatctcatccaggtcactgcaaatgctgttaattcattcctttttatggctgagtagtattccatcatatatatgtaccacagttcctttatccactcaattgatgggcatttgggttggttccatgattttgcaattgtgaattgtgctgctataaacatgcgtgtgcaagtatctttttcgaataatgacttattttcctctgggtagatacccagtagtgggcttgctgaatcggcatcataataacttaataagtcaagaggaggtctgggcactgtgctcatgcctatactcccagcattttgggaagctgaggtgggaggactgcttgaacccaggagtttgagaccagcctgggaaatatagtgagactttgtctttacaaaaaagttaaaaaattagccaggggtggtggtgtgcacctgtagtcccagctactcaggaggctgaggtgggaggatatttcagccagggcagtcaaggctgcggtgagccgtgattgcaccactgcactccagcctcggtgacagagtgagaccctgtctctaaataaataaataaataaataaataaataaataaataaagtcaagagaggggcccagtggtgtaatggaagagcactgttcatagaatctgtagatttgttttctagtcctggctccacaagttacatattctgtgctcctgggaacttcccttaacctacatgagcctgagtttactgatctaaaaagtgggcctaacgcctatctgaaagaattactggggatattaagggtataatgtatattataaagtgcttggtaagtcatagcatggtatctaaatctaaggtatgttgcttttatgacacaaggcagtatctgagttaggacagaccaggggagtggtacaatcagttaatgttctgagttgctgggtaggagttagcaagtaaggcacgtgcaagaattagaacttggccagagctttgaagaataaggccacctggcatagacaaagggaagcagtgtggcctgagtacctgcacacaggttgtggtgggccaggaggatatgaacgagccccatggctgccatagagggctggtggtgcccgagatggccctccttgccatgaagtaggcagaaggcgcttagagctctagtttcccaaatggagctcaattgcttgtcatattacatacacgtgctgttatgtgtgatgatgctctgttctaaccctgaaagacctggtggagccttagcaaatcactggccattctcccaaacactgcgtgtgcttatgctatgccgccatagttttacaagcatttttcagcgtttatgcaaatgctgcccttctgtctttggtaactgctttgctcatctttcaggattcagcttacatcttgtcttctctgtgccacattcctgtcagcagccacctcacaccacccgctcctgtgcacacaggcgtacagagatagtcttgttcctctctgctcttagagcaccattcagctacccccagtggagcactaatcccagtgagctgtgatggtttcttggtgtctgtctccccgcgagaccatgggctcttggtgaacagcggctgtagcctgttcagctctgaccctccggaccctcatataacctgtatgacccatgaaggtgcacagcaatgggaaggatgagggaagaagaaggatcttttcaaactctgtacattcttcacacagaaaagcaggctcatatcagctgacttgttctcccaggcagagaacaagagtgtgccacattcactccagttgaatggtttcaaacttttcttcctttgaggtggatgtatttttggcttttggcagtgtcttagtccatttggactgctaagcaaaataccgtaaacttataaacaacagaaatacatttctcacagtgctggtggctgggaagtccaagatcaaggtgccagcagcttcaggatttggtgaggtttgatttttttggttcatagatgacaccttcttggtgtgtcctcacatggtggaaggagcaaggtcgctctctggggtcccttatagatgggcactaatcccatatatgagggatactgaaagtaaattgatggaagtgctcgtgtgaatgaatgaatgaatgaaaccattttgaagctagattgctaggttcctgcaggttatatctttgtatactccttacctttcaagaatgtctgcagctctctgcatacaataacttccttgagtatatataactacagtatgacaaggcttttaaattgaacaattctaaagactgtttttttgagtccaaaaagtagaatttggtatcaacattaggtttaaaagaagtgatttcagagtttgtcaactattcaagtgtcagaaaaaaataatgtaaatgatgtgcttaagacatttatttttgtattctcgattctcctgaaataaagggaaattgtcttgaaaagctgtagattttaaatgaaaaggaaagcgggaaggtgacataatttgcctctgcctttgcagaaattcaagtgtatatggcctctctccaatccaccattttcccacctccacaggccccatgtcagctgtttccttcatatcattgcaatgctttgagggtgattgttggtttaagctacagtcccttcaaatttgtgaaagactaaacagattgataacaactccacctagattaaatgaaattctgtgggtagacaggctagtcaaaatacaatccccacacaccccaagtgagcattgcttctcctttcagatatgctgtgggtacaaagaaaggatttagtccaaagtgccttggggttttgttcagtccagagtgtaatttttttctctcttttgcctatagccatttctgtaacattactgaaagggcttttttcctaatgaagcatgaaaattgatcgtatcttgccaggagagttcttcctaagtcttaagatattaaagatttcatgagaaccgcatgaagaatatcttcttgaatcatttacatttttcccttttgtaggcttatgtaaccatgcagaaaatctaataataagtgtgctattagtgtaccatgtgccatcccgcaggcagctgtgccatggggcaccagtgcccagggcttgtggatagcattaacctgtacaactttctaaagtaaagcccagtgggaaatctgtaggtaattgaacagatagtccatttttatcagacttccccctgccccttccctgttctgtcttttctcttttcttgtgccagaaggaaacaccttggccataggcctttcattcacaatggagtatattttccaaagcaaatagcttggactatttcaattcccagagcaatctaggtgggcacacagagctaaatttgggtttgaaagaactcttaaattagtatcataggaaggcaatgagcaggaaaaaaaaaaataaagatacaagcattgtggtctgatggaaattatccagcactcacttacaaatgacaagtgggtaccacccagcctttctcatgttccaaaatttaataaagggttccatctaggtcccccagaaactactgtgattatcagggtgagagaagggggaatgatgaatttttgtaatgccccaatctttgtaaccaggcatagaaggacattcgctgggctcaggatgggtgttagcatgtagtggataaaggaattgcagagttgttgacagctgtttcctcagagacacttgtcctgatgatatttgctttggattctaagtaacagagctgtagttcttaaagtttaaattgaaaaaaaggagttttctgtcaagtggcttagtcatggaaatcagtgaagttaagcttgggcaataatatatccttttcaaatccaggtgccttcctgatcatgccagagcttttgtgactcctttctccttggtgttcttcttttgatgcggcgatagggtctgaacacgtccaggctgtctttgctgggagagggcagaatgcctcggctttcttcagccttgcctttcttcattgtcttcaccctgcagcacttctgcaaagctgctggggtaggtgggtgagtgggcgtcttttctttgctagcccaagctgagttctgaagggaagttagcagggctcagctgctgccgcaaagtcagtcagaccaattctcatttgcatgcctacagaattagacatattcaggggctcgggttaatgccataccctcctcttgtccttggaaaactgtaagaatgcgtgcaggtaactctgcagcaattctgtgttgctcagatgtatttctcttctttcagaattcctccttctatagcattcccctaatatttatgtgctggggctttcttctttcatcccaggccccagcttcgctctatatcagacagaggtgggagctgctgatcaagggggcacacttgccatccaaacctcacgatgctcacaggtgtcctttcaaccctgctaacccagatgatacatcaccatttatacctttggaggcattttctctttaattgatgctcacttagacctaagattgttcattaaagtccagaggtgctcattaaaatgaacattggatagtgtggtagatgcaggttatcattatgaatccaagaaagggctctgtggaacttgttatatacggcatttataggttgttaaattaaaggattagtgttgtgctaaaccattttcaggttaatcagttgtgggaaaccagatctaatgttaaagcaggcttaaactatggtttttatagtagggaagtttttaagctactgttatttctaataaaccctctagcttgctaatcgagcatacttttcaatttttgcacttaactgaatatggtcttgttccctaatttttttatgtgtgggctttatttcttcaagctggattgtaagttcctttttagcagggtctatgtcttttttttttttttttttgctcatatcctaaaagcttctggtataattcgaggtatatagcagatgctaaggattttattgagtgattactacatttttagagtgtcattacaatgtattatcacctggtttatgccgtggtgctttatgtaacatgtgcctatttacagaacattgatataacatgttggtctgcaaccaggttgttatcagcaataggaaaagcattacagagttcatatggaagtagaggagaaacaggtctaatttgggtgtgatgccctgtattagtctgttttcatgctgctaataaagacatacccaagcctaggtaatttataaagaaaaagaggtttaatggactcacagttccacgtggctggggaggcttcacaatcatggtggaaggcaaaaggcatgtcttacatggcagcaggcaagagaaaatgagaggcaatcaaaaggggaaacctcttataaaacaatcagatctcgtgagacttattcactaccacgagaacagtatgggggaaactgcccccattattcagttgtctcccagcaggtccctcctacaatatgtgggaattgtgggagctacgattcaggatgacacttgggtggggacacagccaaactatatcatgccctaacctgatcagatatggcttccagactggcccctggagtggcctgaataccttcaccaagacacgtgtgtgggacagatcaaaagtttccatctgccatttgtctttcacttggtaactgctaatgattgcttgttaaccatacacattaatatgcccgtgaagcagatagaaaataaaataagtaaaaaattgtataagtggaaaaactaagacccaaacaagaaattatggatcatttctaaatggtggccaggacgtttatacggagaaaccataccattgaaccataatcaatgtaagaatacaactgatggtttcagactttcaggaatagaatgagtctcaggcagacatgttctcaggcaacatggcctgggacatccccagaaacctcctccatggagttaacaggacacctacatggccctatgtgtccctccacttgggcctcttgttcaacctcgtatcacatgtccccttcctaccacataaacttctgtctctacattctctactctaccacaggttcatttatttgtttgtttgtttgtttgtttgtttgtttgtttatttatttatttatttattttgatacagtgtctcactttgctgtccagctggagtgcagtgtgcaatcacagctccctatagcctctgtctcccaggctcaagtgatcctcctgcctcagcctccctagtagcaaggactatagacatgtgccaccacgcccagctaatttttaccttttttttgtagagatgagttctcactgggttgcccaggctggtctcaaactcctgggctcaagtgatccttctgcctcagactcccaaagagcttggattacagacatgagccactgtgcccagcccacagtcatgttttaaagtgtctgagctataaatactactataaaggtgtcaactggttgtatatgtgggcccttggcatttcagaaatgacagttattgccaaccattaccaaatggaatccattttatccaaatgggcatggttggggctgagcatgggatggagtaatgcagtcttattgcatttcagtgttagagggctttcactcggtttgcagtttctccacagctcacccaccaattctacctgtgtacttcttttctgttccctctcaacttcttttccattctctccttcctcttgtttctgtccatatctctggcttcttttaatttcccttttcccttctttcttattggtctggccctgggtctggtgagaccaagggcacagaaggatactggctccatgccaacctttcctccaaggcacaatctccttcttggcatttactgagatgttcaacttcctgtgtttctaatattccttcctgttttataaaagaaaaatagattggatttgcaaagtgccttaatttgttgattttctaaaaagcaattttaaaaatgtgtatcaacaatatcacatacatgtaactgatttattgactctggcttgccctgggtttaatcacacataaagaaattttacaataacacatgatccagtagagaaagaagtcaaagaaatatgtaaagtcctgtgacctctgtagacatttgggattaaaccaaattaaaacacctgtatgggctgggcatggtggctcatgcctgtaattccagcactttgggaggctaaggcaggaggatcacttgagcccaggattttgagaccagcctaggtaccatagcaagacccaatctctactgaaaaaaataaaaataaaaataaaaataaaaataaaaataaataaccaggcatagtggcatgcctgtagtcccagctactcaggaagctgagatgggaggatcacttgagccagcagtttgagactgcagtgagctatgattgcaccactgcactctagatgcaacagagcaagaccctgtctcggctcaaaaaaaagaaaacacttgtatcaattcaggtcaaatattggtttcttttttttaagagcagattaacatcttgcatatcttttgctatcacatttcttcttatctgaccagctgaaatggaactagtgttaaatacaaataataaaacctgtaaagatcctaagtttttgcatggtacaataaatcctcactcattcacatgcttggagaaagtccagtctgattcaattaatgaaaagcaaaaaaaaaaaaaaattgtaactacataatttttatctcatgtattagctcctatttagttcacataagtgttcaaataggtactcatttttaattaacaaaatatttgtgtgtagtgagtatttttaaaccaattaaaacagttccttcttgtaagtaaattaagtgctattcttagacgatggtatgcatcattcatttgctttgcaaaccattctttcacaccattctagttggtgtgaaagcaaattgagcccatctctactggaatttattgcattctcttaatttctgacactctatgctcccaatagtagggactccatcttagccaccacgacatcccaggcatggctcctagaataatttcagctctttaagactcaattaatatttgctcactgattaatatttagctccattaatttatgtgtccaaattccttaccatttgccaagtgcttttggattttacagttagttacaaactgtagtttaaggtttttctggctttacttcattcttcctttaactagctttaaaaaactagtttataattctagttacaatacaatgttaagtgaaagaactgattcaaaattatatattcagaattattctaactttgtaaacatgcatagatatatgtgagctttaaaaaagaaaattatatatatatgccaaaatacaatcaaaatgtaaatagtggatatatcatgttggagatattaggagcagttttatattttttaagttttctgtgtttccacatatgatcacactttatttttatatcagaaaaaagctatcttagttgtgcattgtacattagaaatattagttttgaagataacctaaacacaagtttttatttcttctgtcacagttgcctcttttcttaaaatcgtgtttgccagtttctttcacgacactgcaaacaattttagtagcttcagttctttgataaatctgtagcttttagatctttgattactattagcaaagaaaagatagacccaaatgaaaaacagttgcatttttgaaatatgtccggcgggggttgatgtggaaagaacaattcctctcaactccagggtcaaagcagcagccctgccaggctctgtcggggtcgcctggagaacatcacttaactttctacatcagttcctgcttctggacattataacattcatgatatccacctcatgcaggattcctgggaggagcagatcagatcataatgtgtgtgaaggggctttgaacgacagtcaccacattattaccaccataagcattatttccatttcaaaaatggtagaggagggaagatgcagatgttctctttatgttggctcggcaccaggcacgtccaggttgtgctgctttaccctccagcatgaagagttagaaggtaaatatcgatattgcttttcataactaatagcttcatagttcatgtcaggtgatttcttggcttccgttagcatttcagagaccattatacacagcagccatcctctgcagagctggagaaaactcatttttcaaggcaaatagtcccaagtcagggttcagtcctggtggaatgaaataaagaaggagagtttatctttaaggtaagctagcatttaagtagatgttggatattatcagagatgcttatgaggggcagagagcattgaagacttataccctttgcacatctttaaatgcctgtaagtgcttaccaggagccaagagcgaacgggtggctgcgtgcaaatgctagaggttaacccctgtccatgggcatttaccgcatgagtaaaaatttattgcagagttcaggactgtgattctgctgctcatttctgtagcgtatttctttatctgaaaggatgcccattgtcctttctagctttttgggccataaccgtgagggaaggcccaaaggaagaacctctgttggagatcaggtttattcatccatgtgggtggaggtacgaaggagggaagaacctctgttggatatcgggtttctttgtctgtgtgggttggagactagtagaataggggaaaccacatactgcccattcctccaggatcattttccatttggatatttagaaagcaacaagagaggagttttagaagacaaggtagatgatttcaagttactttaacatagaggaagaaagtttccttctatttttaatggctagtgcatgatttgtgggagtgaagattgggagggggcacggacgaacaccaggaagaggcggttaatttattggtccccattaattgaatttaataagtgagttttgtcagtttagcaatatccattagtttcagagagtgtttcagtattattctgtaaaagcatccagggatatattttacagctacagcatagattatcttgcacacatattgaagtaaagatacctttcaacattccagatactgacttttcacccaaatttgaaaatctccatttagcactttctaaaataccagtgaaaattaatatagttttgtagatttatgtactaagatgcagattaagacatgtggaatctaatgaacatagcaggaaaagaaaattttctcaagtctgttcattactattcctcatcacattttttattatttaatagcttattccttgaatatgtgtgacttgggattagatgtgccagttggaagacctcagaggttcagaaattcacagacatgtgaaatataaaaccgtattcatttagcagatactgataggcatataaaatagaaccttcatcatctatctttagaaaaagaagattaaacagaagtgtaattaatttgccaactctgcttcccgattgagacatttatcaaagttgatctttaatcattagtttcctaatctgtaaaatgaagtctattatgacctctaaggtctatttgtaacagttaggattaggttcagttccatatcaccaaaaaaaaaaaaaaaaaaaaaaaagaagaagaagtcaagccaaagaaatagacatttatttttctctcacataaaagtggttttgagaggtaagcagtccagggtgattatggtcactgcacaggctcagaaacattgtcacctttctattctgccatgctgtagtatatttcttttcttttctttctttttttttttgagacagattcttgctctgtctcccaggctggagtgcagtggcatgatttcagctcactgcaacctcttcctcttgggttcgagcaattgtcctgcctcaggctcccgagtaactgggactacaggtgcgcaccaacatgtctggctaatttttatgtattttttagtagagacagggtttcacatgttggccaagctggtctcgaactcctgacctcaagtgatgcacccgcctcagcctatgtctcacatacaagatggctgcatagctctagcctttaacattaccattccagaaagcagaaaggaggaagagacgaaggacctaccccctttccaaagacacttgccagaggaaccataccacatttttgtttacttcatgtcaacaagaatttagtctaggcatacctagctgcaaggctaggcataccttcttgcaagtctaggcataccttcttgcaaggcaagaagaagatcaggtcattcagttgggcagcaatgtgtctacctcaaaaccaaggtttctacttctaaggaaaagaaggaaagtgggatattggggtaagcaacaattatccacaggttttgagctcaaaaagccgtgatcgcatgtttctgggaaaatttgacctatacaatcgagtctgaatgtgtgctgggtgtgtacaaatcagacaacttcaactgtgagccttcattagctctcccctttatctagacttaggattgtatttccaggcataggtcagaatctttacactgattgtgtgtgtgtctgtatgtgtgtgtgtgtgtgtgtgtgtgagagagagagagagagagagagagagagaaacagaatcttggctgcaagatgtgctgaatataaacacaataacttagcaatttataactgcccctttcccatctctgccccctccccagtatcagcatacgcagtgttacccccacactatcaatatgtcaatgattaatagcaactggcaaatgtgtgctttccatgagacttgtatgcaaggttactcgggttcacagaggctgctaataacagcagcactattgaattatgctatgtgtctgtgtctgttaagacaggtcggaggacaggggaggaaacttcccccagggtaattgagagacaaagtcactaaaagctacagatctccagtttgggctctatgcatgagattgttcttaaaagtcaaagaaatataaaaggaaattgcacatttgtaatttttttaagttccccatttcatagctcattaaaaccaggactttaatattctgggtcagaacccccattggatatttttgtgaacatgtaacatgtgggttgattagaggtttgggcctgtttttttctttttctttttttttttttttcagacagagtctcactctgtcacccaggctggagtgtagtggtgtagtctcggctcactgcaacctccacctcccgggttcaagtgattctcctgtctcagcctcccgagtagctgggattacaggtgcccgccatcatgcccggctaatttttgtatttttaatagagaaggggtttcaatatgttggctagtctggtctccaacacctgacctcaagtgatccacctgcctcggcctcccaaagtgctgggattacaggcatgagccaccgtgcccagcctggcctattttatttcatgcatatatagtttaagtgtctctgagattcttgatcaactaacaaaatccaagaggcccttttgttatattctaaattcattcctgcttctgattgttgcaaaggggtcagcggatagggtgccagagccagaagttagctaggtggcaggttctgaattaatgtggtattctgggtaatataatgtcatttcctagggaactgccagcatctagctgacctccaagaggacaagtggtcaggaaggtggagatagtattagaactgttattattgttgttgtttttaacaagcagacctgtcatgaaacttgccatagaggtccccttttccatatatcaccaaagcctcataggtaagaaaaggtaaacatccaagattgtttctttaaagattgctgttgggcagaccaagatttagccacaaaaataaacataatctctgatgctgagaagagatcagaatgagttgaaacacaggggaaaaaagaagtaagcagaaaaaaattttacaatagtagatatggggattagatagatagacggctatatagatatataggactctgaatagacccattacaggcaggcatgtaagtggaaatgattaatatatagatgtagacacaggtaattctatataaatgtggaagagcagcaggaagtttctacagctgggaaggaaaaggtaattttttaaaaatgaggtcattacaggttgtttgggtccaggcagattcccattgtcctccctaaacactgcttgtaaacagttttgggactgaatgcaccctttgactgtagtctatgctttacattgactagaactgacaaacagatgaaaagtaaaataatgtttctagagattttctatttggttatgtcatttttttccatggacacatctggctaaagccaaggggtgttaagcccccaaatgtcatttgaatgttcttacagtatgaagaagaggaagaagaaacactttgaaaaccaataattcggccaggcgcagtggctcaatgcctgtaatcccagcactttgggaggccaatgtgggtggatcacctgaggtcaggagttcgagaccagcctggccaacatggtgaaaccccatctctactaaaaatacaaaaagttaggcaggcgtggtgatgcgtgcctgcagtcccagctactcaggaggctgaggcagaagaatcacttgaacttgggaggcagaggttgcagtaagccaaggttgcaccactgcactccagcctgggcaacagagtgagactttgtctcaataagaaaaaaaagaaaaccggtaattctgttttggaactccttgctctgctatggcacatgtatacatatgtaacaaacgtgcacattgtgcatatgtaccctagaacttaaagtgtaataaaatatatatatatatgaaaaaagaaaaagaaaacaacagtgctgattgaggtgtcacacttttgctggttgtctctcctgggtatacctctagcttatcaccgccattctgggaagacaggagcaactgccttttagctgtagtcaccactcatttccctgttagccccttgtggactggaagctccttgaaggagacaaggcaccaagtcacattttacttcatatcccaccaccatgatgtgcctggcacgtaaatgttgaataatctgaacgagtggatccctgaacagtttaataaaatggggtttaaggagactgtgacattcatgaatagcatcacatccaggcttatttctatggctttctattgggctcaatgcctgggtccctggcacatgagaaacaagtatccttgagcagtaggggaaccataccttattcttaccacctcaaaatatctagaactggctgggtgcggtggctcatgcctgtaatcccagcacattgggaggctgaggcgggcagatcacgaggtcaggagatcgagaccatcctggctaacacagtgaaaccctatctctactaaaaatacaaaaaattagccaggcgtggtggcgggtgcctgtagtcccagatactcgggaggctgaggcaggagaatggtgtgaacgtggaggcggagcttgcagtgagctgagatcgcgccactgcactccagcctggcgacagaacgagcctccatctccaaaaaaaaaaaatctagaacctcagcatgaagccatttttaaaatggtgccctatacttagtcaaattcaggcaattcagtttggggaattattttctgtaaatgaggtgctctgaatcagagttctgactccagctttactggctgcctaagtgccatggtttagtgtaatgaaaatacagtggggggtccttaaggcatcattcagggtctacctttaagcgactccagctcttgaacttaatgaactggacactttcaagttctgaacatggtaaataaaagccagcacctgctgccaaaataccttgtctcataatcaaaatcatttctagagccagcggaacatggattccctgagaaattcccactgactcagcaattttaggttgggattttattttagagtcacttaacgaaaagatttcacctagtggcatggccccaatatttatcaggtaactctggccccatctcagcagactgactgattcaatcatcttaccctttactggggatgaaacgaaatgcttactaactcactcctgaccccacctgccactccaagtcattccagcaaacaaatccgtaatagattgctgagagggggaagataggtgaaattggagaatacactaaaaatcaactagttttaaacggtacgggtgggagccatgccccctctgtactggtccactttataaatcccagagggaactcattctatgcttgaaggaaaactttgccttgttctttggttagattgtgctgaacagatcaattcatgtcaaagagcatcaacttttcttatttatgccatggcttccataccacatcacactttatttactcttagtggaaccttgaatcaatgatcaattttgttttgtccttcagtggagtatcagacaccaggacaacctggtcagcaaatattctgaagtcctcagcagttattactagacaggatattagcatatggcacatcatggaattaatttatgtaacacatacttagcatgcacctatcaaatatgtatcaggcacagtgccacggccttaggatggagaagaaaaaacatagttcttgctctcagagagcttagatctagaagttgatagatgctgttttccaagtttctccacttgtatttctgaaactgtgaacagccaactgacatgtagtaagcaatcatttttccagaaaaagtctgttggggtgaaataacatgataagggatctgagaaaagtaggcagggtagggatggcaatggggaagattccgttataaaggaacagcatacatatagattatatcgctgtatatttgtgtctgtgaagcacctcatttaattagatggtatcatggcaactagaagagtgcttacttaaatgagcggctccatgcaaagccctagcagactgaaagtgctttgtaggtattagctgttattattcctactgctcatcactaatatgtagtaggcactccataaaggtttgcgacatgagtgggtgggagatttagtgctgaaatgtaaacctatacataaactgaatatcacatctatatgaatagagaaccttttacagtacaagcaagagcaagatgttcacattatattctgcaaagaatgatctgaacacttaaacttacaggctccgaaagtgtctctctgcccaacatccctatccatttaaatagaaatggcagtagcagcttcctggtgctgctggtgggaagagccgtggtaaggtgtctcctttctttcactccggagcgggggtgatgacaggagagggaccgggcgggagcgaagtgatgatggtgataatgggggtaactgctgagagcgggagggtgggggccaggaacaggaggagtgtgagcgtgagaagacagtgctcagaagccgacacccaggtgacttctctggaatctccctgctctgaaatgggtaacgtggctcctttctctgaagctccaacacttaaaggagcttcttgttttaagcttcttgtgttaagctccagatttttacaagcatctcttcagagcctggtctccaaagccatccgtccagtcagatcaagagctacttgccctgtttctccatagtcacgaactggttaatgtgaggggaaggcaagaatggtctccatcgtcacgggtttctgccttggtttgaagcaagctccagcagttacatgaacaccagttacggaatgtctacagttatgacaagacacagcagggctgacccggctcacccagcaagggaacaaaggccatccacacgtcagacccagcaattcaggtgaaggaacacacagaacctcctagttcgctggatgaggagtcccccaatttcaccagataatcacacaacatgttttcatatggccacatgcccacagcctcaagaaggtgaagcattttcagagaatgattcctgacactacagaaacattgaccatttagaatcagaagaccctcagtcaaggctggcctcacaggaaaatcaaatgtaatgattcccataatgagttcaagccagacaactgaattatgcatctgacattaaaacaactgggggattgtaggaggaggagaagtttgggaagagagaggacagtgtaatcttctgggagtaaaatttattactgaacattaaaaaaagatctgcaagttaagttgagagtcattttgtttatactcgaaatgctacaatgtcctttgatttgtttatgcaagttttaggggacaagttacgtttttttagcatataatctacatttattcccaaaacactgctcctgagacaatccatcagatatttcctcaaggctgtggaaaaggggataaaaggcatatttttaaaggtgggcgtgtatgtgcaaaacatgtttgttttaaagagatctgaatgctgtagaaataattagccatgtgcgtgaacgaaaataatgaataccaaatggtacaatgtcctgcttgaatcctgtttcagaaacagaatgtgaaggaaacattacgttctctcatccctctcttttctctttcacccttgttacccctgaattttgtaataatcactattacccttttggctatgaatttaatgtctctatatatagagccacacccctaacacagattcttcttgcctctcagagacagttaaatgtctttgggtattgcactacttattctccataggggctcagacatattcactattgagcattttcattagctaaaataaattaaatgtatgtcgtaaatgtgcagcaacactgaagaagctgcgagctacatcttgtccttgggagtcatttacttagaataagtaaagactttctcacttgctagtttcaggcgtcttaccttgtgttattccttacaaatggacagggctgttctagaacccacttcctgaatacagggaaagaccccagtggtgtattgggataatggagacagacaggtctgaatgtgaggtgtggacgtgggcttgtgtgtgtgttttctccactggatttcttcaaacctaaagttgctggatcacatttctaacaacaatttgcctgaccttataggatctcctttctcactgaatatgttacgattagaggaactaagattggctaaaggacttttggaatgagccctggacttaaaaacccgttgaagagggagcaaacaagaggaacagtgttttccaagaggcttacttctcttaaattgaaatatagtcatgttccctggctctgagggcactttctcagagcccatatgtttattcaagcatttgcttcgtgatgtgggaggctcagccagtgtaatcccaggcatgagatgttcaaatgctgaatatgttattcaagcacattatttcccattgacatatgtaaatttaaaaataaaataataatgcaaatttacatattgaatcttgggaatggaaaacacatttccgatgtcactgggtatatctgttcccctactttaaaataggactatagagctgttctctttgaagtcatctctgaccatacagtttaatccagtgggcattaattcagattctgggttagtgtcttgtagaagctctccggtgcttctaatattcagcagatattgagaacccatggtctaatccaatggccattcttagtctttctgtttctctgctgcatttaatataattgatgtcttaattttcttctgtcttttttatttttattttttacgtccataggttttgggggaacaggtggtgtttggttacatgaataagttcttcggtggtgatttctgagattttcggtgcagccatcacccgagcactatacactgtacccattttgtagtcatttatccctcacccccctcccaccctttctcccaagtccccaaagtccactgtatcattgtgaggcctttgcatcctcatggcttggctcccacttatgcgtgagaacatactgttataggatctctggggtgtcaatttttctgatgggaaacttctgtggccgcaacgccttttaagcccaagtttttgtcctgcgtccagaaagaatgaggtacacagacatgtgaagggtgaaaaagaagagttttatttagtgttagaacaactcggaggagtggggagctcctctctataagcagatcgtcccattgagtgttcagctctcagcagagaggaggccctggaaagggtggctcctctctgcaggcaagtcattctgcaggtctctgaagcactcctcttagcagagagggtagctcctctctgccagcaggtcatctctgcagctggttgtcccatcgtctccagctatcagcagagagggtactcctctctgcaactggtcatccagtcccattctctctctgccccctttgtccctggccatcctcctgcctgctgtggctaagcccagggcttttatggacctcagaggggaggaagtatgtgccaattggtccatgggtggccatgggtggacggaagaggcaccacgagtccccactctggtcggcaggactggcagcccggcccccagccttcaggccctccctcgcctgaaggtggggcctaattggggactcccctcttttctgccccggaccctgtcttcctcctgctgccattcatggccccggggcttggccccaacccagctctgagatctgagtgggtgcctggaacggagagaggccaggcagtgggcgcagacacatctgagcatgcagagatggggagggtccttcctggggcgcccaagggtgcaggctgcagagacgcccaggtcctgtgcctgggagggttggccacagctgcacccgggagctcccgccctgacaactcggaaggggcagggctcccgcttgttcctggctcctgcctgcttcctggaatgggaggcccaggtctgcagccgtgggtgcggcagctgcagctgcacctgggaaggcagatcctgcctgttccaggctcccccaagagcacagggagactcggatctacagctgcagtttgggtggctgtggccccaagagggcggggctcctgcttgctctgtggagcaggaggcctgggtctgcagctgcagttcaggtggctgcagtggcacgcggagctcccatcccaactcggaatgaacagggctgccaccagctccatggagtatgcagcaccagccgcgcagccagcttgatggcagcagccactgccatcattacggtgttcagttttccattcctgagttacttcacttagaataatggtatccagttccaaacaggttgctgtgaatgctattattttgttcctttttatggctgagtagtattctgtgatatatacatacaataatttatccactcattgattgatgggcatttgggctggttccatatttctgcaattgcgaattgtgctgctgtaaacatgcatgtgcaagtatctttttcataagacgtctcctctgggtagatacccagtagtgggattgttggatcaaatggtagttctactttaagttctttaaggaatctccacactgttttccatagtggttgtattagtctacattcccaccagcaatgtaaaagtgttcccgtttcaccacatccccatcaatatctatcattttttttattatggccatttttgcatcttcgcccttcttgactacttttcctctctctaaccaaaattatggtaggtgtttgctcttcttgccttttgattgcctttcttggatatttctcccagtgtcagcttccctcccgggtactggtgctgcttctgtcaccccgttcccttacctactcttggtcctttcaggagagttcctgtatgtttatcttagagccacgtaaagctaaatgggtcttactatctttattaacgagctttattatctgcccctcctctagcttagcactctgtccattctgtgtatcttattgcagttgtacctttcctattcccacctgagagctcccactcctttggttcaacccagcttccatcaatcattcctcgagccttgccaattttttgtctctcttccatgtttattgtcgctacctgagtctagaccctctgggaactgagctgattggattgcagtcttctgcacggggagccatggtgtagagtggaaagtgtaatggatgtggagttagaaagatcaaattctggactcggttaagcatttaattaaaatgtcttggccaggcatggtggctcacacctgtaatcccagcactttgggaggccgatgtgggtggatcatttgaggtcaggagtttgagaccagcctgaccaacatggtgaaatctcgcctctaccaaaaatacaaaaattagccgggcatggtggcgggcacctgtagtcccagctactcaggaggctgaggcagaagaaccgcttgaacccgggaggcagaggttgcagtgagccggggtcacgccactgcactccagcctgggtgacagagtgagactgcgtctcaaaaagcaaaaaaaaataaaataaaataaataaaataaaataaaataaaataaaaaataataaaataaaaataaaaatgtctcaaacccataggaccttagtagtgcatatttgtctctaggcctgtttcgccacctataaaataagctgcattttataaatggaataactataaatgaatataaatcgatgtggaatttgcataaattccatatagatttgggtttcttggccttatgctgaaaccagcatttgagactgttggtgaaaagaatataaagaggtggtgtggtgtacatattactgtccgtattatggtctgattgtcaccacagtcctccatattagctttttatatgacccctgctttcccaatctagatctccagaatttttttggtgttttttgaatataatcaaaagtttgttttgctcaagattcatcttcctaaaaatgtttgacaaatgcctaatttgaaaattagtttgctgtcttcaagcttctcttaggaaagaaacgtggtccaaaagaagtttgtctagtatgcagggatttttaaaaactggataacccagggtggtctgcataagttatatgcttttcccccaaagaatttcaaacggctttcctggtatcatttgtccttatgtttctttagttccaggacagttcatactgttcttggcagcttacaaaatgagaaactgaggtattgtaattcagtctacttcccttccaaggaaaattgaaaaacactgtggggaaaatactaacaattatgtgagcctcaactttagattctgaaaaatttattcatggaaagcaaaaattcattactattcccataacattgccaacagcaaagagattatattcagaattaaatacagccctgttccatttcttctttgctttgaaactcagtgtgagacagcagtggaaccttttctgacttaaggccaaattaggtcaaaaacctttgctttgaaccttctgagtcatagaataagcagggaggaggaagaaaatccgtgacctgtgccacgattttttactgaggttttgtgcaaagagtgccgtgggcaggaaatgtaggaagaagagaggacatcacttcttcagtgtttccctgtatgtccagagataggaaattcagacatttgctttatttgctaaacttcacagatgtgagcaagaggaatattagaggcaatgtgtctaaattacttacttcgatgtaatgacttcagagctctcaggaggagaatggtcgcggggaaggaacgagcccaaccaatggcatgcccagagtcagcccttcatctgcagttttaagaagtggtggttggagcaagacgtgtttgcagttacaggaataagcaggagagggcagctcaagttgcccatcaaaagggtgggtgaggggctgggcgtggtgcctcacgcctgtaatcccagcactttgggaggccaaggcgggtggatcacctgaggtcaggaattcaagaccagccttgccaatacggtgaaaccccgtctctactaaaaatagaaaaaaattagccgggcgtggtggcgcatgcctataatcccagctactcaggaggctgaggcaggagaattgtttgaacctgggaggcagaggttgcagtgagccgagatcgtgccacttcacaccggcctgggcgacagagcgagactccgtctcaaaaaagaaaaaaaaaaaagggtgggtgagtattcctgcaggaaggggaagattgagcagagaaaaatgtcatccctttcttatccatggggcttctcctcccccaccaagctcatccatcagggtcgacactgctcttgtttgtgtcttcgcttagaagagcctgctagaagagtggcagatgagtcacctgtcactaaaagtaggtgttcttagtgctggggaaaatggaaggtggcagcaaattcctgctgcagttttccgtaaaattggattaccactactggttttaggtgcccctggttttaggtgctctgtatgtaagtttgtgcaaaagtacagcggcatctgtgggcatccaagctgggttctgctctcagcaaactgaagcaagcccaggccagtccaagggaagatggctgtggaccttccttctgttttatgcagcctagtttgaggcagttcaactgccccagagttaaacagttcaccatacataatagaggacttcgtaattaaaataaatacctctccaccaagagaggagaaaaagaaagatgtgcacagtgtgatgcagaaatgcaaggtgccctaaagtcaaatatgttacaggacacagtgtgcagctgtcagggcctctggccagtctccagctatgctggaggtattttctgtgctctgaccataggctacaagaccacatggctgctgctccactctgtagagtttcttgcatatcagaaaatctgagacctgacatttgtgatgaatatttcttgtacccatcacaaatcagaagaacaacccagagaggatgtcaggcacctgttggtctttcctcttgatctacttgttgcctccaagcaactaaggttctttttagagctctcacccctcaaagtgtagataattatattatcctctaaatatctaaaaactttgtttaaaaggactcgattttgttttctgggaaaagcttggtttaatacaaacaaattccatgtgtaacccagctttataaaatagaagggtccgagtgcggtggctgtaatccccacactttgggaggctgaggcaggtagatcaggaggtcaggagattgagaccatcctggctaacacagtgaaatcccgtctctactaaaaatacaaaaaattagccaggcatggtggcgcacacctgtagtcccagctactagagaggctgaggcaggagaatcgcttgaacccaggaggcagaggttgcagtgagccgagattgcaccactgcactccagcctgggcgacagagcgagactccatctcaaaaaaaaaaataagtgaaataagatagaaggaagggggtctggctttattgtggagggcactgttttagggaggtacatacatgaatatgttcctccgtcagggaactgagggtccactgcactgattctcaaccatggctgcacattgaaatcactgatacccactccgaccctataggttctgagttcagtggcctggagtgtggtgtgaccggcaagacttttcaaaatctttccaggtgattctcctgtgctgccaaggttaagaagcacaggtctagtgtagtagttccccaacctagctgccaatcagaatcaccaaaagagatttttaaaatacagattcctaggtcccagcccagacctacacaatcttgggaaactacagaggatgtgtatttttacagcatcacatgtatttctgattatcgactcaggggaccctcactgtaatgtcctcatgcacgattgtgatcttaaagcataatgcctgtagcagtttttatttatttattctcgtagacgaagctgtttttcactgcttcaagtttaatggccaagtgtgtttgtaattgtggttttttgttttttgctttttttgagacaaggtcttgctctgtcgtccaggctggagtgcagtggtgcaatctcagctcattgcaacctccgcctcccaggttcaagtgattctcatgcctcagcctcctgagtagcagggattacaggcacaagccaccatgcctggctaatttttgtagttttagtagagacgggggttttggcatgttggccaggctggtctcgaactcctgaccccaagatccgcccacctcagcctcccaaagtgctgggactacaggtgtgagccaccatgccgggcctcctgtaattgcttgttaagagaatcagacacctttctgaagccactaaccaaccagcagcattccccattctatgagcgcttttcctttctgctttcttggcacatttctgtcatagacctcgttctcagccttgttgagacacctcctttagtttagtgtggagtattttcctagaacaccgcagccagacgtcccccgttatccgcaggttgatttctgaggccaactgcagactgaaagtatgaaatggaaaattccagaaataaacagttcctaagttttaagttgcgtgctgttctcagtagcatgataaaatctcacgccttaccccatcctaacgcagacgtgaatcgtccctttctccagcttgtccgctgcgcagcgctccccgccggtgagtcacctagcggccatcttggtgcttagatccactgtggtgggatggaagtgcttgtgttcaagtcacctttattttacttaatgatggtcccaaagcacttagtgatgctggcatactgttacaatcgttctattttattattagctattatcattaatctcatactgtgcctaatgtataaatcaaactttatcgtaggtatgtatatataggaaaaaaacatagcgtacatagggtttggtactatccagtgggtttcaggaacccactgggggtcttggaacctattcctcatggataaggcggggactattgtactgaaatctgacaataactctgccatgatgcttcttttgagccacaaagggagccctcgatgtgccttgctgtggtcatttcctttaaattcccttgctgtgatcatttccttccatccagcccagcctgagatgtggagactaccagacagagcctcgtgtgatgctctgtcggcttgagtgtgaggaagcttgtaaatccatgcgttttgttaaaacattatcttctacagtgtcattgagggaagtttcaaatcagctgtgaaagaaaacaaaacccacccatctaaggcattactcatgcctggctgttcctggcttgcattagactccctggctggtcccttcaggctctccgttgagagctttctgtgaagttctttgtatattttcccaaatatgtttattatgggttcattttatcttctacgttggaaacgttatagattgagactcagtcactgccttattgctgcttttcatcatcccacccaccatcccttgggttaaccagagcaaaatagaagcaaactatattattcgcgaaactatagcagggaaaaagatccaagtttctggaacgtgtcctgatgaaaaaataagagtgcatcagatgtggagataaaatgtctcaatgttgaagggatgcatttatctacttaacactcagatgtttttctgatggaagcctctgcttatttatattttagcaaaggccaaactaacctgttctaagaaataatctcatactgaaagagagacctcacttcccatttcccaatccaaagtaaatgctgtgaaagaccaggaatgtagtaccgtcagcacacatctgggactgtttgtagcctacgttctgaaatcaggggatgctgacaggctcaagctgcgatactgaaaggaggcctggtttcccttctgttggaattacattacaaggagaaatattgatccagcatactcaagaatgggctgggtgtggtagctcatgcctgttatcccaacactttgggaggctgagacaggcagatctcttgagcccaagagttcaagacaagcctggacaacatggtgaaaccccgtctctacaaaaactacaaaaattagctgggcgtggtggcatgcgcctgtagtcccagcaactcaagaggcagaggtgggtggatggcttgagcctgggaggtcgaagctacagtgagccaagattgggccactgcactccagcctgtatgacagagtgagaccttgtttcaaaaaaaaaaaaaaaccctgaaattaaaaaaacattcactgggggaaaaattggtttcttagtagaagaataccagcaaaactcaaaatgaaaatggaaatgctctgctgccaatcaggaaaagactgaaaatcttggcagaattctgctggaatcctctgcccatttccttcatgttctcataattataaaagaaaaagaaatgaacattgataaagttcctgctgaataagagaagttttttctacctcacatttgttgaatgcatctcatttagtcatcaccctaaccctgtagggtacgtgttattatctccattttctttattttttgagacagggtcttgttctgtctcccaggttggagtgcagtgccgcgatctcagctcaatgcagctttgatctcccaggctaggctcaagcaatcctcccacctcagcctcccaagttgctgggactgcaagcatgcaccaccacacctgcctaaatttttttattattttgtagagacaggcctcactttgttacccaggctggtctcgaattcctggcctcacatagtcctcctgcctcggcctcctgaagtgctgggattacaggtgtgagccaccacacccagccaattcccattttaaaatgaggaaaccaaggcttgggttcggtgatttgctgtgactgaaaatccttccctccccacaaatagggacaccactatcagatatcacatagatcatttcccaggagccaagggcaaagggcagacccgtctttggccaaagccaaattctttcctacacagtaaatatgggaaaaagagagacttcaagcttcaccccaagagttgagacattttgaagaaagactgacacaattaggggagtcgctggatataggagtgaagtgcgagagaggtatcaaatatcaggctctggcctatgcttggagaaatggtgcaaaaccgttagcagaaatatggaaccggagtgcatgctgatttgagaggggtggtaagcatccaagtggaaattcctcacagactcttgagctgagactgaagttcaggaagaagaacacacctggattttttttcttatgctaggcattatagttgcttttatttcatctcaacaatcttttgaaaacgtattatcatcattcacatattccagatgaggaaactgaggcttacagaggttaactgcatcttccacgtccacagtgctagtatagaaaatgagctttgttgtaaacaggagactgccttactttttttgcatttccgcttgtccattaaatattttattgcctgtttagattacagtcattggtgcctacagcagcattatttatctttcattgggaattagggccttaaattaaatcgttagtcatattttatgtttttataatgttgtagagattctagttagggcatggtattctaaaaaggaaaagcattgatttaatttataatgaataattgtatctaaacagtgtactatgtgttctgcgttcaaataagccagaaagcttctatttataccaaaggaataaacagcaaacaacagacatacttaaattgaaaacatgagcacatttgaattttatttttgaatgtagatgtaattgaccatttgttctgcaaacaaggctttggtccagtttagggggaaaaaaaaatcagtgcactagtgtggagtattttctaaaagaagacaattttagagacttagtaaactttctgaaccggtaagacttgaaatgcctcatgaagggaagtgaggcagggaaacttttaatgagagattattccattcaccatctttgctggagctgactggtgtctatgatgcaggaagtaacctgagaaagaattctagggaggaaaatgtgttttttttttttctttctttcttttttgagacacagtctcgctctgtcaccaggctggagtgcagtggcatgatctcagctcactgcaacctctgcctcccgggttcaagtgattcttctgcctcagcctcccgagtagctggaactacaggcacgtgccaccatgcccagctaatttttgtatttttagtagaaacaagatgtcaccatgttggccaggatggtctcgatctcttcatctcgtgatccaccagcctcagcctcccaaagtgctgggattacaggcgtgagccaccatgcccagcctgaaaatgtgatttttttatgcagatgaaaataggaccacagtgaaggaggtagagaagagggcctttcttagaaaataatcggaacaaccacagccagtaattgtaggtcttgagtacgccaggccctcatctaaattcttcttatgtgtgaactcacagcaagcctgtggggtaggaactagtattattcccactttggagatgagcaaactgaggcacagagaaatgaattagttaggcctggttagtacttagatcagagaaattaattaacttgcatcagatatacacagctgaggagtaaggccaccaggattccaaatcaggtggcctagatcccaggcctgtgctgtttgctgcagcagtcataggaggtagtttgaactggaaagcagttcatcatgagaggtagcattttttgaggcactactgcctgcttgcatgctaggcactgaattgtcccatgcaattctcataacaacttcatgaaataaggcgtattactatcttcatttttttttttctaaggcagagtttcactcctgtcgcccaggctagagtgcaatggtacaatcttggttcgctgcaacctccacctcgcgggttcaagtgattcttctgcctcagcctccctggaattacaggcactcaccaccaagcccggctaattttttttgtatttttagtagagacggggctttgccacattgaccaggctggtctcgaactctggatctcacatgatctgccccccctcggcctctgaaagtgctgggattatatgtgtgagccaccgtgcctcgccatactatcttcattttcttaaagaggaaatcaaagcttagaaagttgaatgggcccggtgctgtggctcatatctgtaattctaacactatggaaagccaaaatgggaggatcgcttaagcccaggagtttgagaccagcctgcacagcgtgatgaaaccctatctgaataaaaaagtttaaaatgtagctagatgtggcggcacaagtctgtaatcccagctactaaggaagctgaggatcacttgagcacagggaggtcgaggctacagtaaactatggttgtgctactgtgtccagaattaggtgcgttcttggtctcactgacttcaagaattaagccgtggacccttgcggtgagtgttacagttcttaaagcggcatgtctggagttgttcattcctccctgtgggttcatggtctcactggcttcaggaatgaagctgcagacctttccggtgagtgttatagctcatacaggcagtatagatccaaagagtgaacagcagcagcaagatttattgcaaagacaaaaagaacaaagcttccacagtgtggaaagggatcggagaaggttaccactgctggctcgggcagcctgcttttattctcttatctggccctacccatgttctgctgattggtccattttacagagagcccagtggtctgttttgacagggtactgattggtgcatttacaatccctgagctagacacaaaggttctccagggccccactagattagctaaataaagagtgtcgacacaaaggttctccaagtccccaccagagtagctagatacagagtgtggattggtgcattcacaaaccctgagctagacacagggtgctgattggtgtgtttacaaaccttgagctagatacagagtgccgattggtgtatttacaatcccttagctagacataaaggttctccaagtccccaccagagtagctagttacagagtgtggattggtgcattcacaaaccctgagctagacacagggtgctgattggtgtgtttacaaaccttgagctagatatagagtgctgattggtgtatttaaaatcccttagctagacataaaggttctccaaggccccaccagactcaggagcccagctggcttcacctagtggatcttcacagaggcagtaggtggagctgcctgccagtgccgtgcgcccgcactcctcagtccttgggtggtcgatgggactgggcgctgtggagcagggggcggcgctcgtcggggaggctctggctgcacaggagcccacggaggggcagggggaggttcaggcatggcgggctgcaggtcccgagccctgcccgccagaaggcagctaaggcctggcgagaaattgagcacagcggctgctggcccaactgctaagcccctcactgccctagggccggcggggtccgccgctgctccgagtgcggggcccacggagcccacagccacctggaacgcgcgctggcccacaagcaacgcgcgcagcccgggttcccacccacgcctctccttccacacctccgcgcaagctgagggagccggctctggccttggccagcccagaaagaggtcccacagtgcagcggcggggtgaagggctcctcaagagccgccaaagtgggagcccaggcagaggaggcgcagagagcaagtgagggctgtgagggctgccagtatgctgtcacctctcactacactccagcctgggtgacagagtgagacccggcgacaaaaaagagggagagaaaattgaaagactttcctaaagtcacgagttatcaaatgccagttagcccggtctaacatgacactgaatcaactatgtgcttcctgctcaggagtcagaacgatattatcaagtgttaatgcttctaaatgcaaagagggagcaaggtgtttcttctctttagtctgtgaccagcagctgctcactataacctctcttccactgcatgtccaaggattactgcatagaggaggattcccatcttcccagcccctaaatttaaaaataaattaaataggctgagcgtggtggctcagggctgtaatcccaagcggtggctcactcccactttgggaggccgagatgggcggatcacctgaggtcaggagtttgagaccagcctggccaacatgatataaccctgtctgaaaaaagtacaaaaactagccaggcatggtggcaggcgcctgtaatcccagctactcaggaggctgaggcatgagaatcgcttgaacccaggaggcggaggttgcagtgagctgggatcacgtgactgcgctccagctctggctactgtctcaaaataaataaataaataaataattaaaagaatatagaaccgccctcacacttcctgccggatgcagtcaatttgacagtgtgcctcattcagagggtgttgcctacatccagggagtgtcaatttttttttattgaatgaatacctgattaagttaatgacgctgagctgggggaggaggagcagtttggcagcccaatgctgaagggcttctggcagctcattcagtgtccttaatgttccattggctttgtgctgggccgcatgtgagccccaggagaggctgctgtaattactcagcttttttattgaaaacagctgcaggtagcgagtcatcccattgtccatcttgctagtgactggaaacaactcggggccatcttgggctccactacactgcagcctcattctgaagtcagtggaggtagaaagtaggcttcccacttgctgggcttttcaaaatgagccattcatcttttgagggtcagaagtcagccacccattcaccgagtgtgagtcatacccctaattttaaaacaaacatttattgcagagagaattcttatcttggccgatgtgtacagctgatctccttgtccttcctacgattgatttaggctggtttcaacaaaattgttgtctttgtaaatacacacctcttccagtaaatccagagactaccgaggtgtttccttgagattgagcctaagacaatctttaattagttttggataattggatatgaatgtttagaggccttcccatatagcaagtgtctttaacatctcacacaatatattatacttgtacttcctgacccgagaagtaacaggagttaataatctcacgtgagaaagtatgtttgaaatggaatctcaaggggcagattctttgcagataccacaacattattttatgtccctccgtaatgagttcagttttttatcatcacatccaaaatctagaaaatgatccagaaatcctttgccttttaataaccagcttgtaaggaagacaaactgcaagagatggacacaagataagaacagtaaccaaccaaggacggacagcaccctagaaacccaaggggttgtgaacttcagtctctaagcagcatcggagtttacggtctaatgacgaaaacacgtgaaaacaaggattgcagcagccggaagtggctttgctgagagtttaggaatgattgcctaaggaagtagcagttaggggacccactgtattagtcagggttctctagacagacaggactaataggatagatgtatatatgaaggggagtttattaaggaatattgactcacatgatcaaaaggtcaagtcctacaataggccacctgcaagctgaggagcaaggaagccagtggttgaccagtctgagtcccaagacctcaaaagtagggaagccgacagtgcagccttcagcctgtggccaaaggcccaagagccctggccaaccattagtgtaggtccaagagtccaaaagctgaagaacttcaagtcgggtgttcgagggcaggaagcatccagcacgagaaaaagatgaaggccagaagactcagccagtctagtccttctacgttcttctgcctgctttcattctagcctcactggcagctgattagattgtgcccacccagattgagggtgggtcttcctctccaagcccatgacccaaatgtttatctcctttggcaacaccctcacagacacaaccaagaataatactttgcatccttcaatccaatcaagttgacactcagtattaaccatcatgcccaccatggtgaaggcatgcgggggtggctggtgttagactaattggagccttggaggatagtcgaggaaacggttcctgaacggtgtgtggatgagaatgttggagcagggtgctaaggaggcacagaggagaggcagagggtatggggttggagtggggagagccttaaggaggtgacatggaaggagagacctgaaagatgggtgaggccagtgcttctggaagtgtggttcctggaccagcagcatcagcagcatctgggaactccgggtgaatgtgatgcgcacgctcgagtataagaaccactgcattagaaaacaggtgacagtgccttgcggaggagcggtggctggtgtggaaagtactctaacagagcagagggaacacatacccagaggcctgcagcaggcatatttgaggcttgatcaggacacagccacccacacccactggttacaaattatctgtggttgctttcagcctgcagaggtagagctgagtaatggccacagaggtgtatggcccgcaaagccacacgatttactaggtggccgcgcatcgtcaaggttttccagtccctgattcagagggtggaactgacataacctgatgacagaatcaggggagaagaggcatacagggatatcggccagctttcagtcttcagtgagcaatgacatgatagagcagtgacactaagatactgctgcctcactttttacagctcacagtcccctttgcggatgtgagaaagggcatacagctttaagggcttaaaggatgccctgacgtccagtcctggaatacaggctaatgccagcaggtatctcagagatccttgtagctccaagcagatgagggagcggggcgctgtgtggtttcaaaacagaaatgcagtttgttcacaaacttttaagatcatgacatatttatttatttatttatttgagacagagtctcgctctgtcacccaggctggagtgcagtggtgcgatctcagctcactgcaagcctgcctcccaggttcacgccattctcctgtctcagcctctcgagtagctgggactacacgtgcccaccaccacgcccggctaattttttctattttttagtagagacagggtttcaccgtgttagccaggatggtcttgatctcctgaccttgtgatctgcgcgcctcagcctcccaaagtgctgggattacaggcgtgagccaacgcgcccagccatgacatacttatttttaaaaatttttgactggtgacaaaatatgcataatatgaaatttaccatcttaatcatttttacgtgcacggttaagtggcacattcttgttcaaccatcaccaccatctgtctccagaatgtttccatcataccaaactgaaattctggaaccgttaaacaactcccattgccccgtcctcccagctcctgctaacgcctgttctacgctctctccaaatttgactattctagattcctcatagaaggggaatcatatgatattgttcttttgtgtctggcttctttcacttagcataatgtttgaagatttatcaatgtcatagcatgtaacagaatgtcattcctttgtaaggagagggggatgaataatagctcgtcataaggatataccacatttttaaagtttattcatctgttgatgatcattgggttgttgacaccttttggctcgtgtgcacaatgctgctatgaacacgggtgtggaatatctgagtccctgctttcagtgctttgtggtagatatccagacgtggaattgctgagtcatgtggtaattctgtatttcacattttgaggaactgccaaaatgttttccatgcagctgcatcattttacgttcccaccaacgatgcacataggttctcgtttccccatctccaccaacacttgctattttccatttttgttttgtttttttttttaaaaaaaagaatataatgtccatcttaatgagtgtgaagtggtgtctcattgtggacatagcatataattttaagtatgattaaaggaggttagaacacgacttttgtgttggcaaagtggggaaaaggattggctgctgtaattaaaatcactgagacaggccgggctcagtggctcacgcctgtaatcccagcacgttgggaggccaaggtaggtggatcgctcaggtcaggagtttgagaccagcctggccaacatggtaaaaccccgtctctaccaaaaataaaaataaaaataacatagccaggtgtggtggcaggcacctgtaatcccaactacttgggaggctgaggcaggagaatcacttgaacctgggaggtgcagtgagccgagactgcacccattgcacaccagcctgggtgacagagcgagactccgtctcaaaaaaaaaaaaaaaaaaaaaatcactgagacatactgccaaggacagatggagttagggggcttaaagatcctctataccagccgggtgcggtggctcacgcctataatcccagtactttgggaggccgaggcaggcagatcaagaggtcaggagatcaagaccatcctggctaacacggtgaaaccccatctctactaaaaatacaaaaaaattagccaggcgtggtggtgggtgcctgtagtcccagccactcgggaggctgaggcaggagaatggtgtgaacccgggaggtggagcttgcagtgagccgagatcacgccactgcattccagcctgggggacagagcgagactctgtctcaaaaaaaaaaaaaaaaaaaaaatcctctataccagaggttctcacctctggctgcaaattagaatcccctggtgcatttcctaaaatgccagtggtggtcccaacatctagggattcttattcagttggtctggggtagatctggacattatgtttttaaaagctccctgggtgagtctgatgtgccgtcagcattgatttcttattctgcaggtgagagagtatggccctagtactaaggctgcaagggttctggtctctcagccagagctgctgccactgatacaccattattcagcatgaccacaaacacagtgaaaccagtagtgtcccaggtacatgtgcatcctcctttgtattgtggaggaaatatgtccccaaaatctgcagagccaagtgcgggagccaactcctccatttggtctgttgggatgttcagtattctatggtagatttctagtaagtcaatttcactcagtgggctgaggatattaagacaccggaagttagctgatgtgttcccccattgctccaacactttgaactctgtaccccaaaaattgatccactcagtgcttcttacatgtatgtgccattggggagatttccacagggaggctttctctgagcctttggccctggtgacattacactgagtaatatatatccctgttcctttctgtaccacccatctgcctgttccctggccacagtttggggtataccaatttagattaacctaattattgtttcacaaggcattcttatcactgaacgctgatggatgttacttcaacgttgttatattttattacttggcctatttaagtgtataaccatcactagctataagaaggtgaccaactacaacgttagagagagcagtgcctgcaccacgaattgcaagttcagggggtttcccagaccaccctccgttttgataattcagtaaaaggactcacagaactcactgaaagctgttctactcatacttattacagggaaaggatacaagttaaacttagccagggtaagaggcatataggagaggtctagaggggtccagacatggggcttctgttgccctctgcccatgaagtgatgaacagcattacctcctcccagccatgatgtgaagaatcaccaaccagggaagctcacgcgaacctcagcatctagagtttttattggagctcaattgctactgtcctcatgactgacctctagtccctaggccctcctggagatcaggcaaatatctttcattattagttcctctgaggttggaacgtatacctcatggcccaaagcccccatcataaatcacattgttactccatccagtggccaataaacatacttctgtgaggcaggacattccagaggccgagagatcacctccccacaggtgggggcaaaggccagacctgagtttgggtgaggttaaattcttcatggtcaggcgcggtggctcatacctgtaatcccagcactttgggaggccgaggtgggcagaccgcgaagtcaagagatcgagaccatcctggccaacatggtgaaaccctgtctctactaaaaatacaaaaattagctgggcatggtggcatgcgcctgtagtcccagcttcttggaaggctgaggcaggagaatcgcttgaacccaggaggcagaggttgcagtgagccgagatcacgccactgcactacagcatggtgacagagtgagactccgtctcaaaaaagaaaaaaaattcttcactacacactaatgacccactacacaacccaagaactagatcccaagttttcatattaggattttttgtgtgttgtttctgcccttttttagccatgtaatcttaggcaagtgacttacactctgagcttcaatgtccttgtctttgaaatggggtgatcatatgctagttgttatttatatgtaaagcattgctgtagcctgcacaaattaagcatcgtgacttgtcctgcctgctgtgccttagagagcctgggtcccgggaggtcttggggtctttgcagttgagagcattgaattgtgcagtgtctcagtgactgaaaccaccatagaaggtaagccagtgtgtgacacctggaggaacagctggttagtttatgaattatctggaggcattggctttgctttcattcagccacaccaaggacagtgaatagttttaagactctcccagagtacctcagttcccacgagacctttttcctgacttgatggagagttttatgttctctgttgtagactggggctgtctaatgtcctggaaacccagccccctggtggctggcaggatccagcctaggcctcctggagcagttgctggcgctttgcatcgtgttgtgtggtgaagctcgtgagtgtgtgtgcgggtagacagctggcagccttccctgcgggatgtggaaggaggattctgcatttccccaccatgcgtcttgggaattactcatccaaaaagtattgtggaaaagcaggcagagtgaaacacggaggcattgcacttaacccttccctggaaatgccatccttgagtttagcgtctgagctttctgtttattctgcttgtgtgctgaattgccttccttcttgttggtgtgcataggggtctgcacattgggcacttataaatattatcccacctatcaagtgaagaaaaaaatgaactctcaaacacccatcacttcctctttttctatcacagatgtgaggaaaaaacagatgtttgaaagaattgatagtttgaaggtgttgtattgattacatcatggccaggagagatgagcaacagataagtgtgggtgatcactgagaattcatgaggaaatgtttattgaattataactacgatggcgaccatgtactgagtgtgtgttatactaggcactgtgcatgttaattcttccccattttaaaggcagagattacaactttacacattgttgaaatgaaatttttgcctcattaaacttgggcacatgtataatcgcaagtaaaattaaaattattattttgagatggagtctcgctctgtcgcccaggctggagtgcagtggtgtgatctcggctcactgcaacctccgcctcctgggttcaagcgattctcctgccttagcctccctcgtagctgggactacaggcgcctgccaccacgcctggctcattttttgtatttttagtagagacaggatttcactgtgttatccaggatggtctcaatctcctgacctcgcaatccgcccgcctcagcctcctaaagtgctgggtttgcaggcatgagccaccacgcccggccaaaattatatttttaaaaatggataacataggtggtttggggtaaagccaaggtttgaacctgttctctaccttacggcgtagcccactctaactacaattctgtgtgtccttagtagtaatagcagtggaatattattgatctattatcatcattgttagtaataataatattaatatttatcttgatattctaaataggacagtggatgtgaatgcttcatgcatcgggtagtgagatctatcacagtggtggtaagaaacattcaagtgagagtcaaagtgacaggttctcatcctcctgaccccagttcttactgtgttaccttggccaatacttttcatcttcttgcatcagtccttgaaataagataatgaagagggctcacttcctctcactttgaaacaagttagtctggactgggatgagaaccactaactccaggcagcgtggaaagcatctgtgtaactgttcccagccttcaaccagagtggtggataaacagaaacgtgggtgcccccgggtagctaacctggaatgcactacgctttaaagcaaaaaagtatttgcttctgtattgaatcaggaaaggtcttgacagaaaggcatttccagcttttcttaaaaactccaactcaacctctgtcagacaattcatttgggaccagcttggatccagatggttatttttccatcttgagcctttccaggaattccggcatgggcaggccgccagagacactggctacacagccactgcagcgcgttttccatgtgagccggcttctagggatggcccagccaagctgtggccccgcccctcctccttcctcatccaggctgatcctccagctctcacggacatgtgccatgagccacgcagggggaccccagccacatggccgatgtcctgatgtttccaggggtggcagagctcactaactgcacccccagaactgtcatctgctcactacgaatagcaatggcagaagccaggaatctaagaattgatgaagcctggccctccattatgtggacaggtagtagcaaatcactcagccccacttagggataagggagacagcaacttaaccacgtgccaagcagacaagttcagcagaatggcagccagtgcagctgtgtgtcttgaggaattctttccagcctccccttcaaggcccttaatcaaagaacaactccccactggacgcagagctacccaagccagcgaccacccgaatgagactattattttgggtggatttaaattttttaatcattgcttcaagtatagtcgtatccattgcccaaaaagtctatagatgcatggggtcaaaaaacactactattcgtggtgctgataatataagtagtggggctgcttttctcctgcctttgcttgacccactgcagtcccagctggcagtggtagtggcagattcccctgacccaaccacccccaggaaggtcttgcctcaaagaaaaggaaaatgtggtgtgtgctgctggctgccacggactcaggggagcctgtgccaggttgcaggcttgaacttgcttcttgtgacactagagggagagagcttgtttcaaaagcatgttagtgctctcagttcctcacgtccgacctgtgccagaggctccttctgcagtctcaccactcctatggcctggatcacaattgggtgggtggtcttgaacttggctgctgagcctgaggtcccctgcttgcttgcctgggaaatacaaacatcctgacctctcttccttggtcactgatcagtctcttccttactgaacgtctcaccagctgcagttcttgattagtcaacatggtgcagaggtcccctagacatcttttcccctacttatccctgtgcattctgtcccttttctacatgaaaaataaataggcatatttgctatgaggctgccatcgccatagccaggaggtgagtgtaacccgcatcatggttgggtagactaagaaagtgatttccagtgctagttctacctctgactgtatggccttgggaaaacctcagtgtccttatctggaaaatggagataataatacaaacctcacaaatttgttatgaagagtaaatgagatatttaagtaaggttcttggcatgtataataagtaatcaataaatggaagatatttggattggtttcttagggctgccataataaattaccaaaacatatcgtggcttaaaacaacagaaaagtattctctaacactcctggaggcttgaagtctaaaattaaggtgctggtggagccatgttcccttcataggctctaggggataatctttccttgcttcttgctgcttctagtagcttcgggtgatccttggcttgggactgcgtcattccagtctctctgcctctgcctccacagggcctttgcctctgtacatctcacatctttctctgcctttctcttataaggacatttgtctttgaattgagggcccacctggatcatccagcatgatctcatttccaaatccataattacatctgcaaagaccctttttccaaataaagccattcccaggttctgagtgggcataacttttagggatctaccattcaacccactgtccttccttattcatgataaaaattaagatacataaaattatttattttttatgtccttaggccctcgtgtggactccttctagcttggattacgagctttcatttcttgctttttctcttctcactcactacacttccgtgaagagcaagatcccatgtcccaggggtgcagagccgagaagggaaacccgagcgcgttggggcgaggctctcagacagcatcttctacaaagttgtgccaggtcccagctcgcctctctggtggtttctggcctggatgtctctagacagggccttcagtccccttcaggagcctcctcattttgggccaagaggcctgccccatgaagctccacgcttagatagacatggaagagaaggtcaatagtcagtttccactgaggacacagcaagaagaaattgtgacagtagactgggatgacaagccagccaccttgacacagagtggaatcacagtctcagaatgttcctaatggcaaaaaaatgtagagtaagtagttcgaacacccaaccagggcagggacccctaccccatatccctgagtttctatcctgacccttggggtgacccagagatccctgactcatgaggcagcccagtccatttttaaccattctcattgcttcctaatgctgcagctttttctgttcttccccagggcactcattcccagttgtctcagctgttactcatctgcttgcctccagacctcttgcgcaactgatcactccccctagacatgccccatccttcccacgtgcctttgcagcaggatttcaactgtggctttacccgtgccatctatggttgcagtatttattcccttattctgaacattgttttctttctcttttcttgagacagggtcttgctttatcacctaggctggagtgcagtggagcaatcatggctcactgcagcctcaacctcctgggctcaagcaatcctcctgccttagcctcctgggtagctaggaccacagatgcaaaccaccatgcctagctaattttttttattttttgtagagacaggatctcgatatgttgtccaggctggccttgagctcctgggctcccaaagtgctgggattacaggtgtgagccactgaacccagcctgaacattatattttttttaatgaaggttataattactatactttttaagaaccctaccaaatggttgttcatattgagtgtatagtcaaacaaaaactttctgggctctttcattgaaaccattattaaaccagatctcttcaaccctgctagtaggctaattgagctgttgaaaccaagggcaggcatttacatttattctcattgatcttaattttcctggtttggtaccatcacttccggcttcttaagatatatttgaatcttattcgcaacatatatcccttctagccttctgttacttcgaaatatgataaccaaaacactgtattagtattgaatagaacagaactaaaaatagagttctggcataccatttgcttcacactgacattgaacaattgaggtccccgtcatacatactagaaacggaatgagtgtttgatgaatgaatgtgtgatccactttgggggcatgcctgttcagtcaaccataaaggcatctaattatagctatcatccaatccacctttctccattctagatactccaagcatgtcgggtttggacctgtttttaatgcttggccaaaatgaagtgctttctgccagtgcaccacacaggccttccagtttagtgatgtaataaagctggaaggagattggtgagtcagcactttgagaatccttgacatgcccaagtaacctctgtcctcacacccaggtattctgccctcttcagtgtttgcatacgtagtttttccagtcctggcacaagctcatcagcctgctcttcctcttctttaaagctgaaaccgtgccctgtttgtccatagatatacaggccaggcagccatgggttcattcaaactgagaagcacaggattgggggtgtaggaaaagcaacccattttcttgccctaggtttaagatgtatttttaggagtttatatatcaaattctaagagcatcttccattctgagcagttggctgctatttactggacttgcagtcagtgggcatatattccccacatccctagcacagaagcatctcattttcctatcacttcccaagcagtctgaatccatggtaatagcaaaaaatttctcgaaatgaaattatagcaaagaaagaagtgtggagcttcctttgttaaatttcatttttcttcctgggaatgattgagttgtgtataaaatttatgataatagcctttttaaagtatatttctctgcagttgtgtaaagaaccagaagaaaagcagcatttgttatttgcagccgtattaggtttagatgaccccagaggaagcagtggagcatcacctaaatattagatgtttatctccgaggctccatcaactctgtgtttacgtacaacacctagtttggtttcccagtgcctgctccattaggaagaggctagagatgtttaatttgcttaagagtttagcagtagaaaatttaatcggatagctgctagggtttctcaaaccttactgtgcatagaatcatctggatatcttgttaaaatgcaggactgggtggggcctgagagtctgcatttccagcaaacttgcagaggatgctgatgtcacgggtcggaggaccacacttcgactagcaaagccttataccactgggctaaatttagaaattatgatagagagatagttaatgtagctctaaagcggcttaagatgaatgtattcagaacagtgattatcaggcaaaccatgggtagcaaactctaaatacatttgtcttgattcatctattaactctccctccaatttcccttttccaataggaatgtttaaacagtgcgatctgcatatgtggctctctggtaatttggcattgatataattgtgcatggccccatgtttggaagaaatctttttgttgtggcaggtgcttccagagataaactcctcgggggtcccctgggagggcaattcaggacacagaggccagttgtctgcaactagagactctaagagcagaaatcccactctccttttttcttttttcttctttcgtttctttttctctcttccttattttccaaatctacttttccaccttcataagttacttctttgttgtttagtcccatgatcacccgatagaccaggaatgtggtgccatcctggggcgccctctggtggttcattgaaaatacagcaagacccaatctctacccgtgggtttccccttatcagtactgaaagcttacggggcccagagaagggacacatacctcagcgttagagagccctgtctgctccgtgctgcactggtaaatagccctaaatgtaggaggaggatgggtggaaacttttatcggtttggccccagctcgctgcaactgctgtcttaatcattgtgtccttgatttctcattggcaatctctggaaaagatgctgtttatcaatggataagttttcagaagaataaatttggatttgtgtgttaaggccaatatgtcttagcaatcatttcgcagaagaccagtccagtgagtcttcagggctgactaagccgatgtctctcaaataaacagtataattaaacctgagcactactgagaaccaagtcagcattctttttcaaatttacgaaagctggcttcctaaagaagtaccttcagaggagttttctagttttgtgtattgtgcattcaattgtacaggcaatgttacatttgcattgctaatagacccttcctgaatgtgtttgacattttacttggctttgaaaggacttttatgccgctgctttttcttccctagtgctgccttgggctaattaacctattcccttactggctgggcctactatatgcaaatgttctcattttgcattctgacacatcactcttgcataaatatccctcatgaaaccctgtggggttttattggatcagtgctgcaggagggccagcagggggcgcatggactggttctctctgagtaggtctcacgcatgagttttccttgctcgttggtatggaaatgtgggagcgtttggcattccctttcttaagagtgagtcttgaaatttaaagataaaagttcattattagaacttctttttacaagggaaggctgtacagaacacagttatttgtcacttacaaaaaccctaggtgggcagggcgcagtggctcacgcctgtaatcccagcactttgggaggtagaggctggtggatcatttgaggtcaggagttcgagaccagcctggccaacatggtgaaactccgcctctactaaaaatacaaaaattagccaggcatggcggcagccgcctataatcccagctactcaggaggctgaggcaggagaatcgcttgaacccgggaggcggaggttgcagtgagccgagattggcacattgccctccagcctgggcgacagagtgagactccatctcaaaaaaaaaacacctgggttgcgagagtaaataagtgacattactccttcaacacttcatttcttcagcataagtgttttagggtttttttaaccttatttttcatttccgtcccagtctttaagcgcctctcttgtcatatgagaaattctattcttactgaaatgtcctttgatatcgagacaccaaatttctaaacctgcaccttcctagatatctgatcaaaatcattaaggattgagaactttctgttgtatcatttgtcatttcattatgatgttcattgatgatgttggagcaaaaccaataagggccattaaatcattgccccttccaagctggctgcagtggctcatgcctgtaatcccagcaccgggaggccaagtgggtggatcactgaggcctgttcaagaccagcctggccaacatggcaaaaccccacctctacaaaaagtacaaaaattagccgggtgtggtggcgtgcacctgtagtcccagctacctgggaggctgaggtgggaggatcacttgagcccaggaggcacaggttgcagcaagccgagatcacgccactgcacttcagtctgagcaacgaagcaagaccttttcaaaaaaaaaaaaaaaaaaaggaaggaaggaaggaaaaaaatcattgccccctctaaaaaatagttacaaagtagggggcagagtagagaaagggggttatgtttcagtagggatttcagtgttgctccaacatggacaaggattgaatgctgaaggccgctactttattgtgtttgttttaaaatcggatcattggctacacacagtggctcatgcctggaatcctagcactttgggaggccaaggaaggaggatttcttgaggccaggatttcaagaccagcctggttaacatagcaagaccccatctctccaaagaaagaaagaaagaaagaaagaaaatcagatcattgaaaagagggtctggatgtgagataccaaaacccaagggtgtggaattcccaaagcccaatcccacagctctcagaatcacagcatgttgcactgtgcatacctacagctgctacctgtggaagcaatcacatccgctgcttgctagcctgggtcatgtcagttccactgatatttggcctcttgtctgttgggcattggtttgcccacacagcagcagtaactcagacttcagtggttagtaagagactgagatacttgaccataagaactggctccagggtcaccatttgtatgtccaggtttgaacacactgatctgatttgtctgaaagagctgtcgtctctagtgttaatggcgagttgttactttccaatgagaaaggggacggtgtgaaggggaacttcaatgacaacttgaaaaggaagagagagatggacaaaccaagcatgtaacccactgagaaaacattcagtgcactagccctatttttgtatggtatttgggttttttaaccataatcaaattcggtttttaacagtctcactccgtcatcatatgagtggctgtactgggaattcttttgaaacttgcagagaacaggattatttctggcggcctctgctgagttggcgtgtgtgtgtgtgtttgtgtgtgtgtgtattagggagaggaaatcgtaggtccagtgtggacccagagctaaggggaatcttggagagtagtggctctggcagatgaggattcagaaatcgagtgcaaggactgttctggactttcactgctaacctgctttttctcagtgcctggctctgagggcagggtccagctggtgtcatgctctccaagggcttcattttatgttccagccaggcaaaggagaggtgagaaatggaaccaacatttctgaaaaggaaatttaagaactgcatcatctgcccttgaagaagaaaaggagaaaaaaaaacaggagagagggtattgagaacatcttaggggagttgttaactccattaaaaaatatatgtgttacagtgttcacttgcccagtgtcttcataatcttcctttataatgtgcagctgccacggctagtgtttttgtttttgttgttgttgttttgtttcgtttttggagacagagtgtcgctctgttgcccaggctggagtacaatggtgcaatctcggctcactgcaacctctgcctcctgggttcaagcaattctcctgcctcagcctctcaagtagctgggactacagccgtgtgccagctaatgttacaccaggctaaatttgttttttattttttatttttggtagagacggggtttcaccatgttagccaggatggtcttaatctcctgacctcgtgatctgcctgcctcggcctcccaaagtgttggctagtgttttctctgcttcagtgcttggggtatgattgggttatgggagttcacaccgagtccagggcctagtcttaatcttgccaaagatgttctttccccggtgctcatgttctgatgtcctttccctccttccctttctcctccctttccttttccctttgtcactgccctcttccctttcccagcatccagagctgctgttggcggattgtacccacggggagatgattcctcatgaagagcctggatcccctacagaaatcaaatgtgactttccgtttatcagactaaaatcagagccatccagacagtgaaacagtcaccgtggaggggggacggcgaaaaatgaaatccaaccaagagcggagcaacgaatgcctgcctcccaagaagcgcgagatccccgccaccagccggtcctccgaggagaaggcccctaccctgcccagcgacaaccaccgggtggagggcacagcatggctcccgggcaaccctggtggccggggccacgggggcgggaggcatgggccggcagggacctcggtggagcttggtttacaacagggaataggtttacacaaagcattgtccacagggctggactactccccgcccagcgctcccaggtctgtccccgtggccaccacgctgcctgccgcgtacgccaccccgcagccagggaccccggtgtcccccgtgcagtacgctcacctgccgcacaccttccagttcattgggtcctcccaatacagtggaacctatgccagcttcatcccatcacagctgatccccccaaccgccaaccccgtcaccagtgcagtggcctcggccgcaggggccaccactccatcccagcgctcccagctggaggcctattccactctgctggccaacatgggcagtctgagccagacgccgggacacaaggctgagcagcagcagcagcagcagcagcagcagcagcagcagcatcagcatcagcagcagcagcagcagcagcagcagcagcagcagcagcagcacctcagcagggctccggggctcatcaccccggggtcccccccaccagcccagcagaaccagtacgtccacatttccagttctccgcagaacaccggccgcaccgcctctcctccggccatccccgtccacctccacccccaccagacgatgatcccacacacgctcaccctggggcccccctcccaggtcgtcatgcaatacgccgactccggcagccactttgtccctcgggaggccaccaagaaagctgagagcagccggctgcagcaggccatccaggccaaggaggtcctgaacggtgagatggagaagagccggcggtacggggccccgtcctcagccgacctgggcctgggcaaggcaggcggcaagtcggttcctcacccgtacgagtccaggcacgtggtggtccacccgagcccctcagactacagcagtcgtgatccttcgggggtccgggcctctgtgatggtcctgcccaacagcaacacgcccgcagctgacctggaggtgcaacaggccactcatcgtgaagcctccccttctaccctcaacgacaaaagtggcctgcatttagggaagcctggccaccggtcctacgcgctctcaccccacacggtcattcagaccacacacagtgcttcagagccactcccggtgggactgccagccacggccttctacgcagggactcaaccccctgtcatcggctacctgagcggccagcagcaagcaatcacctacgccggcagcctgccccagcacctggtgatccccggcacacagcccctgctcatcccggtcggcagcactgacatggaagcgtcgggggcagccccggccatagtcacgtcatccccccagtttgctgcagtgcctcacacgttcgtcaccaccgcccttcccaagagcgagaacttcaaccctgaggccctggtcacccaggccgcctacccagccatggtgcaggcccagatccacctgcctgtggtgcagtccgtggcctccccggcggcggctccccctacgctgcctccctacttcatgaaaggctccatcatccagttggccaacggggagctaaagaaggtggaagacttaaaaacagaagatttcatccagagtgcagagataagcaacgacctgaagatcgactccagcaccgtagagaggattgaagacagccatagcccgggcgtggccgtgatacagttcgccgtcggggagcaccgagcccaggtaacgttagccagggtggcacagggatgggacaccacaccgtgatgccatcatcatctcctggcaagacgaattgcttctatgaggcaggattaagggttctcgggtacacctagaccttagactcggcctttcccaactgcgttctctagaaaaaataagccccatttccccgtgatctctgctgtgtgtaatgaattaacctccatgcatggagagtggggctagttatggagtccttgagacaatccagaaactcaccactctagttattttttgaattctgtgattaagatgaggaaccctgattaggaaacgctgctggacttcaggtccttctagtggtcattcggcactttttcttaccaggaaaagacagaggatgccgttggagtgaggggattagatgctaaagcaatcatatcccattgcaacatccatgttttaaaatatgtcttattagctgggtacagtggtatatgccttcggtcccagctactccagagactgaggcaggaggatcacttgagcccaggagttcgaggctgtagtgagctatggctgaacctgtgactatcactgcactcaagcctgggcaacatagcaaggcccggtctccaacatatatataatgtcttattatttaggtatgataaggccaacagatagatcagcagacaactctctttgacgagataatttttatactctctgatcccaagaggaaagggcactctacaccaagaggtgtagaacaccgtaaagtggggggcacctggggaagccccaggtgggtcaggaggtggagggagtgaggggaaatgtggcaaacaacagcctttattgtggtttcatgggaggcagggtaaacgggtttaggattggttagagtggataattccagtgtgctctggggtgtaggggctgtccttagttgtctggctgctggtgctggggtgatcaatacaggtggaagggctgggcacagtggctcacacctgtaatcccagcactttgggaggctgaggcgggtggatcaccagaggtcaggagttcgagaccggcctggccaacatggtgaaaccctgtctctactaaaaatacaaaaattagccgggcatggtggtgtgtgcctgtaatcccagctactccagaggctgaggtaggagaattgcatgaacccgggaggtggggattgcagtgagccgagatcaggccactgcactccagccttggacacacagcaagactctgtctcagacaaaaaaaaaaaaacagatggaaggcagccctaagtgtgatggaccaatataggaggctgctggggagtgggctctggactggttagtttgcatatgaaagtcaggctcctaggaattagctctggactggttggtttgcatataaaagtcaggcctctaggaattagctaatcctaggagagactatacctctgggatccacaagacactaaaatatcaaagcatcagaaaataaaagcgtggttaatacaatctgagaagtcagggctgtcccaggtgacctgctgggcttggggtaaagtcagctgtagccaagatgagtcactggaagtatggttaacgctcttaatttccacaggctccttcaatctacccttttccaggttcttagatcgattacatgcatttattccacagcccatttctttcactgcccaagttgctgggagtccagcaggttcagcctgcagctgagagctttcctggctatcgagcgtactttctacaagtgtttccatctaggatttgaaaacattcaaatgggacagagcctccttccagcttgagttgaaaatagtcatgaaatagctgctatttgggacattcagataaaataaaacaagaaaaaaaagataaactaattaatggtttgaattgttttgggcatttttttttttcatttttgagacagtgtttcttgtctcctaggctggaatgcagtggtgcaatcatagctcactgtggccttgacctcctaggctccagcgatcctcccaccccaacctccctagtagctaggaccacaggtgcataccaccatgcccagctaatttaaaaataaaaaacattttagtagagatggggtcttgctgtgttgcctaggctggtctcaaactcctgggctccaagcagtccttccacctcggcctcccaaagccctgagattacagacacgagtccctatgtctggcttttttgagcatttcttaaatgcccaagtgaggaaaggaccaaatcagttttccagaaccactcgtgaatgactggatatgggggcttgcacaaagccggggccctgcattgccgagagcttttagccctgaatacttttctttgtattatgagatgtcactgtaggtttacagtctttggaagggcccaagaaagatttccccaaagatcttatttaaaaaaaaaagaaaatcaggatttttaaaataaatggcataataatacagctcactacccctctgtagtggctgttcacttcctgcatgaattaggggtgggtactaggagaaagaaaatgaactaccttgagcaaagttgactcttcacagaccccaggtgacacatggaaaataaacatgagtgaagagtcattgcttttcatggtacttagaatccttaacacatttttgtgaacagaggcaggtgtgaaaagaggttttgtttagaaatgcgactggttccttgccggccagcatcaacttcagcttgagaatgaaggcagccacttcagctgtgggccacacttcccaggcctggcagcctctgcagaaaccagactcttctattttttttttttttttttttttttttttttggagacagagtcttgctctgtcacccaggctggagtgcagagtgcagtggggtgatcttggctcactgcaacatctgcctcttggttcaagtgattcttctgcctcagcctcccaagtagccgagactacaggcacacgccatcaccccctgctaatttttgtatttttagtagagacagggtttcaccatgttggccaggctggtctcgaactcctgacctcaggtgattcacccgcctcagcctcctaaagctgggattgtaggcgtgagccactgcgcccagccccttacagccctcttctgttcttggggaggaagatctaggtgtgtttttccctactccaaactttgcaaaattaatgattaaatgaaagagaaattggcttccctgtgaagtcagagccctgttctcatgttttttcccatagtgagatcactaaatctctctactgacagccagggtgcagacgagcaggtagaagtgttgtcagggcctgttggcaggtctgtgaggttggcccccgcgtggctatgctgcatgccgggaagggcttcctcaaagaaaggcaagtgtgctgagacctgctgaaaaggcagctagggcttcacgctgtagaaacaaaagtgcaaggcctgacgcaaccaatgatttgtcactttaccgaggagcctatcagaaatcggctgacatcatcacagctaaaatactccaccagctgtgtttgccacaagtgacaggttcagagtcagtggagactcagacagagagcatgagagggggagatgggagggagagagagaactcatatctggacttaattgaggttccaaaggctacatccttctcccctctgcagtgccttcctgaggggttttctcccctagcctgaagaatcttcctggtcttctcaactggttaggcactgctgacactgcacccacagagaaattcagaaatgtgcaaattgttgagcttaataagcaaaatcacaaatttgattggggaagttgtggaagaagagatggttttctccaaaacagatggcattgtgactctaggcagaaatcctgcatgaacagactcttgaggatgcctgaactcataagacccccccaacatcacacccccagggaaagcagtgtgatatagtatggtggtgacagacccaggggtgcggatttgggtctctggcaggacaagttacttcacctctctgagctgcagcactctcctctctaaaccaggcaaatgagttttgtttttctgtgggtttttgtgttcgtttgtttgcttgttttgagacagggtcttgccctgtcacccaggctgaagtgcagtgatgggatcattggctcactgcagcctcaacctcctggactcaattgatcctcccacctcagcctccccagtagctgggactatgggtgtgtaccactacacccagctaattttctgtgtttttttgtagagacagggttttgctatcttgcccgtgctggtctggaactcctgggctcaagcgatccacccacctcggtctcccaaaatgctgggattataggcgtgagccacggcgcccggccacgtatgattcttcataggagataatctcttgagagggttccgttttttaatgcttcacttttatactttccagaacagcacagcccttgtaaaaatttattagcgtcggttaacaaaaaaccaagaagagcattaagatgaacatgtactgacctcatgctaagcggcacacagacctcatgggaactaaagccatggcatataaaactgaggggtgtttagtttggggatgatttttaaggggctgaattcctcattaagactgtggaaagatgcccccagcattgtcccagctgacgctccagacgaggcaatgtaggagaaaaatgcttttccgtgtttgtcactatccctgtggcattgccctgcccagtacagcttttctccactcgagcaaagcgtctatgcatcccccaggcccccacctaggtgctgtgggaggaaaggggaatgccaggtgttgtccattgttactgcgtgcaccaaaggaagcctccttcctcttcagtggagggtgatagcacgttccccaccctggaagagagttgctgctttgccatgccttgattctggttgagagtcccaaaggatgacagaatcacttcccttgggcctcactgccaaatataatccacttaatatcctccaagtttgaggccataagtctgtggcgcatccagatgcgacccccgaggcgatagcatcaacgtgggagccaatgcaactcaaaagaaggatggggcttcgcacctcctccttgggtaggaagtaggttagctgcttggaaaatgcaggaactggcactgaagagatctgagtctgaacatatccctcacccgtcagtagcactgggaccttgtgcaatgttagttttcccttccctgcttcaacttagatggctcgggccctgagaaagtgattcacagctgaaaaataaatcaaaggcctcgtgttctaaaaagagtttatggaaggagaggcagctgatgaaagtctagaaagaaggctgaacttttccaatgagcacaataagccatttttaccctgcctgtaatcctcggggtggaatcccgcgagtggccgaggcgagcacccttcccgccgttcctgtttctaaggctaaatgatgtcatgccagcctgcgtgagcatatcaatctgtatttctgagtatgaactggatttgaggggtgcattggtgctccagccctccagatcagtaagacaaccaatgcagaaacaagggctcccaggctcctcttctgcaagaggctgttagtgacgtgcccgctgggacagccctgcccaggatggccccagctggggagcctttggcttccatctggcggcgttctatattatcccatccttctgtctcacccttcctaggttcagcttctctgaagagtacacagcatttgctcagtggagttgtaaaatgtattggtaaagtgctctgggttgacacgttcctttgcttctttcctaaatgccaggctctgtgttattagggccgtctgtcgcttcccagcgcctcccgaggtgactgcttccctgactcggtggctgcttaatattcagtgccatttcctcctcccgactgtcctggcgtgggtgtgagtgtgcctgtgtgtgtgctcgtacagcagttgttatcatgatgtacttactggctgtctaccgatggctttcctttcattctactattttttggttgacttctgtgagctgtgagtcatcggtggtaacattatgcattgaatggattagctggtacctaaaaatagccgaggccctcatgcaggcggcacatgagcctgtagagtcagtccctttgcagccaaggcagacccacttgccaacattgaacatgccgagcttggtggcgatgaatcctaatgtatcaaaaaatagatagttggtgactgccctgtgtgcagagcccagccctggatttgtgccgcagttgttggtaatacacacttcctgtctgttctggtgctggaaaggctccaacagagaaactatgtcaaaccacatttttgtttgtgggtctttgtacctctctaaaaaaaaaaaaaaaggagaaaaatgctctcctttaaactgtatgtgctatatgtgcccccaactgggtcatcttatatgttttgattctctcagactgttgttgtttatagcatttagaaaaaaattaaagactattgtttaaagcagttttaggtgtacagcaagtagagagaggtctcacacacctaacagttttccctgttattaaaatcttgcattggtgtgatagattggttacaactgatgagccagtaccgataccttatttttaactaaagtccatagtttatactacagttcactctgtgttgtacatgctgtttttgatgaatttatgatgtcatgtatccagcattacattattatacagaacagctgtaccaccctaaaaatcccttatgcatcaactatttgtcccccacaccccacctgaaactcctggcacccactgatcattttactctctccatagttttgcctgttccagaatgccatgcagttggaatcatccggtatgtcgccttttcacattggcgtctctcacttagcgatatgcatttcaggttcttccatgtcttcttgttgctctgatagctcatttctttttagcactgaatattatgttgttctttaaggcacattttttttttttgagatagggtcttgctctgttgcccaggctggagtgcagtgacaccataatagctcactgcagctttgacctcctaggctcaagcaatcctcccacttcagcctccctaggaacagggaccacaagtacacaccaccacgcccagctaatttttctatttttttgtagagacggggtcttgccatgttgcccaggctgctcttgaactcctgagctcatgtgatcctcccgcctcaggcccccaaagtgctgggattacagggatgagccacccttccctgcctaaggcacacattttaaggccccagaaaaggaaggcaagtgagctagaacctgtgtgcctaagggcttccgtgtcacagctgctgtggtcactcactgggcagtgtccttcctggccatccctgagcctccccacagggccttcccacaagggagctctgtgagccacgctaccatgtgtaagaaaaacccagcttttaatgtgggatttgtgttaggaggcgtcccggtgctagggtgtgggtttactgaacaaccctgaaacacttccaccaaggactgagtcaggctttgcgtgaacatgattcagtgttttaaatagaacactcacagagattcttacactcagccaaagcgttttgactgtttttattaatgatttttaaacattgcagtaaatgggtctctcgcttacccccttcatctttgagacggggttttctgatttttttcatgctgagaacgtaaccatgcagacttagccttccaggaaagcagaccggcctttctctacaggtaaaacaagactgagaatttcacttgcagacaaagttaagaatgcccaatttaataatttcgccaaaaaacaagacatacttactgaaacctagcttatgagagaattcattgctcccagcaacaggcgaaatttgtatgtctgggatagtgtcatgaaaaaatgttttgtaaaacagatgcccttcgcaatttgtgaaaacagggactcttgtgaaggaaatgggagacatatttaaacaacagacgttttgttttctttctatcttgtttttggtgatatgtacatatgtgtgtatatagacatagcaccaatctaagattgaaatatacaatcaaacagcataaatatgcgtgtatgtgcatagtgtttagatatagtagttattgactaagtggtgaaaggaattttattgaattttcatacagaggagctaaaatttttcttaaaagccagtcattagtcagattaggaaggtgacatttaaaaaataattatgagcccagaagtgagtcggtgttgtctccctgtctaggttcgtccatccaaaatgggagttggaggtgacagttctagaggagtcgatttagggggatggatggaggaaggggtaggcagatctcttataaccacactgatgagcacatgggcttgctggcagcagtgggaggagggagggaaagagtggaggagggtgggaggcggtccacccccaaaagcaagaggtgctggcgacagggcatccagagatgaaagacagagggccctcaagcttacaaaagtataaaggccatccctgggcgcggtggctcacacctgtaatcccagcactttgggaggccgaggtgggtggatcatctgaggtcaagagttcaagaccagcctgactaacatggtgaaaacccgtctctactaaatacaaaaaaattagcctggtgtggtggcaggcgcctataatcccagctacttgggaggctgaggcaggagaattgcttgaacctgggaggcagaggttaccgtgaatcaagatggcaccactacactctagccttggcgacagagtgagactctgtctcaaaaaaaaagaaagaaagaaagaaagaaaagttataaaggctattctacttactgcttagggtgtttgaaacaggatatatttactggatgaaaaaatgggctatattgagctgtctggcgttatgtaacgtgctttggttatctgtggtactgctcccatgagtttattttcattgggatttaatcagaaaccattctggaaaatgtgtggaaccccagcaagatcataaaatgacttaatgattactaacacagctgcaagaacgagagtggagagaaaataactgaagtgtgattcaataaaatcatgacgacctcagcatctgacaaggtgaggtggctatggctccgctgagaaagctgcctgttaggcggtaaagccacaccctggagaaagcactgctcctctccctgggggaggtcacagcccactttagttctggctggttaaaaaaaaaaaaaaaaaaaaaaaaaaagacaggcagtctctctattgccccctgttgtccacttgtaccattgcaatgtttttccatacagaaggcaaacagaactattctttcagttttttttttgttttgtttttgttttttttaagacggagtcttgcactgtcacctgggctggggtgcaatggcgtgatcttggctcactgcaacctccgcctcccaggttcaagcaattctcctgcttcagccttcagagtagctgagattacaggcacctgctcccacgcctggctaatttttttgtatttttagtagagacagggtttcaccatgttggtcaggctggtcttgaactcctgacctcatgatcagcccgcctctgcctcccaaagtggtgggattacaggtgtgagccaccatgcccggcctcttctttcagattttaactgagcacctattacttgctaggaagtcttttagactctggagatagaacactgagtttggggaaagaggcaaaacagacaaatatacaagtaaataaaaaagaatgcataagaagataaccagtcccttttggcaccagggactggtttcatggaagaagattttttggcaggatgggaagagggagggggatggttttgggatgaaactgttccacctcagatcatcaggcattagttagattctcataaggagtgcacaacctggattccttgcatgcgcagtttacaatagggttcacgctcctatgagaatctaatgcttgcgactgatctgacaggaggcggagctcagtctggaatggttgctcacctccagctgtgcagcccagtacctaacaggccatggactgctactggtctgttgcctgggggttggggatccctggtataaagaggagaaggggccaggctaggtggctcatgcttgtaatctcagcactttgggaggctgaggcaagagggcacttgaggccaggagttttgaaaccagccaggccaacatagcaaggctccatctctacataatgatcatcattatcttcaccaacaaaacattagctggacatggtggtgcatgcatgtggtcccaactactcaggcggctgaggcaggaagatatcttgagcccacgaggtcaaggctgcagtgagccatgatcatgctactgtactccagcctgggcaacagaacaagaccctatctcaaaataaaaaaaggaagctatggaaactagagggttgttattttaaatagaactgtcaggggagttctctctgaaaaggacagtgggtggcaacagtacgtgaggcaaaaaagattccaaatgaatggagagagtagcaggtgcccagacggaaggcgcaagaggggttaaagaaccagcaaggagaccactgttgctacagtgtagggagtaaggggcacatgcagaccacatcaggcttgcatgtggtgaccgagcgagtgagatgcagcttggccaggacaaaggtggtggaggtagtaaaaaaatagtatcattctaggtgtatttggaaaaggaacccatacagtttgcttataattgggatgtttgtgatgtaagagaaagagcggaagaaagtatgattccaaggtgcttgattgaacagccggaagaatgggataccatttatggagatggggaagaacatgggatggccaccgggcaggggcacatcgggaggtctggtgtgttttaggtcactttaagtttgagttgcccattcgacatctgagtggacgtcatcggatagtgtggtcactggtgtccaaatgtacccgttttgcgtgtatgttctgtctcctggtgggaggcaagaaactaggtcttaaccaatagatactcttctaaggttcctaacacttagcaggtgctcggtgtatacttgttgaacttttattaaaactggaaagcctgaaatgtatcattaggaaccctcaataatattttgaggccgggcacggtggctcacacctgtaatcccagcactttaggaggccaaggcaggcagatcacttgaggtcaggagttcaagaccagcctggccaacatggtaaaaccccgtctctactaaacatacaaaaattagccaggtgtggtggcttatgcctcccagctactcgggaggctgaggcaggagaatcgcttgaacccaggaggtggagtttgcagtgagccgagatagtgccactacattccagcctgggcaacagagcaagactccatctcaaaaaaaaaaataataataataacaatattttgaagctatcagcatcatagagaatacccatatgggttttaaattcaaggaattcacagacttattgttccagttgaagatgacatcatcctacaaaatcacaccgtctctgtttcacatccaaaccagtccccgctggcattgacagcatgttttgagatggagaaggctcctctccaagggaatttcaagcaacagatttgatgatatatattctcactgagaaacccctcagtgagatttcttcattaacggttaatgatcagttaacctttaagaatgtttatatccttatgacaaacctaattataaaataaagatagatttgctatgaatgcttgagtgtacctatttgagatgtgtgcaacaagattttaactttcaccaaagaagggaaaaaaaccttattttacttctcatacattcagaccccaagggggaaaaagtacattgtctaggtagttcacactaattagtgaggagaaaactagcattgggctggcaagctatccgatctgtgcctacaatgatcagattatctgaataatcttccgctcccacctcagctttcatggacccagctgatatctggtcgtggcatcttttcgcagggtgacacagctcctttggtaggaagcaaaggcagaatttaggcaaaaagaaacaaagagaagcctttgaagtgattaaagaagaatctcccaagcctatctaggttaacataaatttcattaacaggccaggtgggcgcggtgactcacttctgtaatcctagcattttgggaggctgtggcgggcagatcgcctgagatcaggagttcaagactagcttggccaacatggtgaatgaaaccccgtgtctactaaaaatataaaaaattagccaggggtggtggtgggcacctgtaatccctgctacttgggaggctgaggcaggagaatcgctcgaatccaggaggcagagattgcagtgagctgagatggtgccactgcactccaacctgggtgacagagcgagactctgtctcaaaaaaaaaaaaaaaattccattaacgtcatcttgttttagtacgcatctcaaatattctctctctccatcacttttctctcgtgaatttttcggcaggctgttctagctatggttcacaccacagcatttaattctaaggcctgtctttggagatttggagtttggtttggtttggtttggtttttagagacagagtcttgctctggcacacaggctggagtggtgcagtagctcgagtgaccctcgcacctctgtaactgaacttaggtttggctgctcaccactcaaaagccaaatacgagagatgaggttggtgagaggaaaagcaggtttattgggaaagccagagaaattgagaagatgatgagctagccttctaaagtaccatctccaggccaggcatggtagctcacatctgtaatcccagcactttgggatgccaaggcaggcggatcacctaaggtcaggagtttgagaccagcctgacccacaatggccaaacaccatctctactaaaaaatacaaaaattagccaggtgtggtggcacatgcctgtagtcccagctactcaggaggctgagacaggagaatagcttgaacctaggaagcagaggttgcagtgagccgagattgtaccactgcactccagcctgggcaacagagaatccatctcaagaaataataattttgtaaaaattaagtaaaatctccaattttttaggctggttggagggtttttatgggaggggggtatggggggagacgaaggggttagtatcgaggagactgaggaccatagacatttgggcaccagtgagggttcaagaaggttgagaacttctttgtccttggtcaggtcataatgctccttcagtctttagtatttttaatagagggtttcaccatattggccagactggtctctaactcctgacctcaggtgatccgcccgcctcggcctcccaaagtgctgggattacaggcgtgagccaccgtgcccagccactcctatcagtctttaacaatatatagttagttgtttatatacttcccctttaatcccagagttagtttctaaaagtacatgattgttgtttgtgtatattatctcggtgccataaaattatcctagcctacgtgcaggaaagggtaaaaccctttaaacaaaaatggagttagttatgttcgttcttttgctatttcacaattgtacctcagcctcccaaagtgctgggattacaagagtggtgtctttggagttttgagatgcggaaataatgaaaggctttcaaaatgtccaataacattatgaagtctttagagggaaacacgtgtatctgtatcctgacttttgcactaatcaattatagtacctgttataaagggcttgtagacatttcttaatgagtctacagatacttggtaacgtggaaatcctcagataagtttacctatgagaacacagtagatgttattttcagaaaattaaatattgcctgccctgtgaagtgtgtataatgtggctcacacaccaagggcctctccatgggtaggtgtccggccatctgccagcaaggagacagggagttatccgggaacacgcagaaccagaaaagaggctgacatgtttggaactaaggcttctggtcttctgaatgtcacattacctctgcctggtgttgggcaagaataagcaaaccgcaactctggtagagagtcttacgagacagatgttaacacctgagagttttatttttatgacttggatttgcagcaaaacaatctccacttgatgtgggattggtttccttctgttcagtttatgttgttaatgactctaagaggtttgcaagaggatctatggagccagttccagattggtcctcctacttagaatacagtgggtatccccatctgatacagtcacttgtaagtatatttgtctatgtatatatgcacatatatgtttctgtgtgtgatgtaaatgtagttttgaaaccaaatagtgtcacacacttgtacagggtaactagaattgtatgagtggctataaggcaaacactgcatcacaattatctgtaccatggaacaagcccatgagctcatgcctttggatcctacttatttcagtcaatattcaccactgttggggggtagcaggaatgcttagttcatctcttttggtggcattgtaatgtctttgctcacaagggtagaggtcaggaggcacagaaaaaagaaaatgggtttgggggccaatgactgggataaaatcctaaacccattagctaatagctatgacattaggcaagtgacttaatctctctgtgactattcgtaaaatttacaaaattggaagagcaatactattccatactaatactattatgaacattaaacaaaatactttttgtaaagtttgtacctgagagcttgacagagagtaggcactcaaaaacttttagcttgcttcacattataaaaatagcccagaacaatgaaactttcccccagtaatacacacaggagaaggggttcatgcttacaagctgccatatgaatgtactcaagttgtctcttctaaaaatatgccttgtatggatccagtaaagtctgtcattctagaaatgtatcagaactagatcaatcagagttaacaaaggaaacaaagaagatgaagtagaaaagcaacaatctgtggaaatctactacttttaaagtttttttggtacttcaattatgcatgtgtgtttttgtgtgtctgaatgtgtataaaatccaatggaggcctgacacggtggctcacgcctgtaatcccagcactttgggagactgaggcgggtggatcatgaggtcaggatatcgagaccatcctggccaacatggtgaagcccccactctactaaaaatacaaaaagtagctgggcgtggtggtggtggtgcatacctgtagtcccagctacttgggagtctgaggcaggagactcgcttgaacccgggaggcggagattgcagtgagccgagatcgcgccactgcactccagcctgggcgacagagcaagactccctctcacaaaaagaaaaaaagaatccaacaatattttaaatattgttacatatagccaatattcattcagattcaccatgtatctaccattttcattcctcttcattcctccctgtacaaacttcaatctagatttgttttttctctacctaaagaataccttttagtattttctataatgcagatctgttgatggtgaattcttttaattactgtttgtctgaacatgtctctattttgccttcattctggaaggatctttttgctccatatagaattcgccattgacaattctttttctttagcactgtaaagatattccattgtctccattgtctactggcttccattatttttgttgagatgtaaactgtgagttccattgttgcttatttggagataatatgtattttgttctagaggctttttttttttaatggagtttctctattgtcgcccagtctagagtgtgatggaatgatcttggctcactgcaacgatcttggctcactgcaacgatcttggctcactgcaacctccgcctcccgggttcaagtgattctcctgcctcagccccccgagtagctgggattacaggttcctgccaccatgcccagctaatttttgcatttttagtagagatggggtttcaccatgttggccagactggtctcaaactcctgacctcaggtaatccacccacctcggcctcccaaagtgctgggattacaggcaggagccaccacacccagcctgttctagaggcttttaacgatattttttcctgtttagtttacaagatgtctttgatttatagcagtttaattctcatctgcctcagtgaggatttctttttgtttatttttcctgtttggggctaggccttcttgaaactgtcttattatccttcttcagtttgggaaaattcttagccattacctcctcaagtattaacttctgccctattatctccctctcttcctcctcctaggattcaaattatgtgtctgttagcccctctcaatgtatcctatgtgtctcttaccctctcctccatattgaccatctttttgtctctatgttcactctgtggagtctcttctaaagctctaattagagaatccagttcctgaattctttcttaatccatgtctattcaactggaaagctcattgcattcttgatttcagtggtgtatattttaattctacaattctcatagaccttttttaattaattaattattattattattattatttattttttttttttttagagacagagtctcactctgttgtccaggctggagtgcagtcttgtgatcatagctcactgcaacctctaactcctgggctcaagatcctcctgcctcagcctcctgagtagttgggactacaggcacgcatcaccacactaggctatttttttttaaatttctgtagaaacggggtctcattttgttgcccagactggtctgaaactcctggcctcaagtgatcctccctgtctcagcctcccaaagtactgagattacaggcatgagccaccatgcctggcttcatggatcttttaaaaacagattctagtttcctatcaaaattctcaagctgtctttaatcttcttaattattgtaagcatagtctttgtaaagtctatatgtatgactctatatgagaagccctggtgcatccttttttaagatctgatattttgctagtgcttatacaagctatctggtctcctcatgaccaccaccccccttttttaaattgaatgcttttatttgcaaaattgtgaaagtaattcaagaccttaatccagttttagggactcagatgagtcaatctgagcttcagaccttgaaaggcctgttggcttgtggttcactgtctcctctaagggacagtgctttggggtcacaactcaaaagaatggggctcaccagagaacaccctcccttggtgtatcctgaactccattacctgttccctatgctcttaacactatcaaaagcccacttggtttcccaactgctccactttggaatgttcaagtgccttcaggagaaaacaggcccccaacaccagcttcacctctctgggccatcatcttttcctgatccaacccaggaagtgtgtgtgtgtgtgtgtgtgtgtgtgtgtgtgtgtgtgtgtgtgtgacggagtttcactctgtcgcccaggctggagtgaagtggcatgatctcggttcactgcagcctccgcctcccgggttcaagcgattctcttgcctcagcctcctgagtagctgggattataggcgcctgccaccacacctggctaatttttgtatttttagtagggacagggtttcaccatgctggccaggctggtctcagagtaaagtggcacgatcttggctcactgcaaccttcgtcccccggactcaaacgattctcctgcctcagcctcctgagtagctgggattataggggcccaccaccacacctggctaagttttgtatttttagtagagatggggttttgccatggtagccaggctggtctcaaactcctgacctcaggtgatccacgcgccttggcctcccaaagtgctgggattacaggcatgagccaccgcgcctggcctttttactatcttatttgctgtccagtactataagaaaaaaagtttaaacattttgtccagagtttttaaatttatttgtttgcttatatttttgttcagagtttttagttgtcctcagaaggagggttggtccaaattacctagtctactacatctagaaaggacattggaaattgactttttttttttttttttgagacggagtctcactctgtggcccaggctggatcgcccagtggcacgatctcggctcgctgcaacatctgcctcctgggttcaagtgattctagtgtttcagcctcccaagtagctgggattacaggtgcccgccaccacgcatggctaattttttttttttatttttagtggagacggggtttccccatgttggccaggctggtcttgaactcctgacctcaaatgatccacccaccttggtgtcccaaagtgctgggattacaggcatgagccactgtgcccagccaccaagcatccttttaggggctggggactcagtgataaacacactgtgcctgcttcttggaactcacagtctcactctgatccatgtttagtcctgtcctgtatgataatagcagttgtccattgagctcataaaatctaagaccgcgctgggcttgtgagccacctgcagagcctagcttggtgctgaaagctaagtgggtgctctgtcattactggggttcgattgactggttctaacagagaccagctatagagctaacacttgatggaatattttgaatattgatgaccttttcactggcttctgcctatggcaagtagaggtacaacccaaagagaagagcctcatttatagtgtgtggctgggggagagggaggtttgcaaactgagtcattttcccccattcagcctgtgtgtgtctgtgtgagttcatacctgtgtgtgtgcataaaatcaaacaagaataaaatgttttcatttgttcccttccttcttcctctctctgtctctccctgtttccacaggtcagcgttgaagttttggtagagtatcctttttttgtgtttggacagggctggtcatcctgctgtccggagagaaccagccagctctttgatttgccgtgttccaaactctcagttggggatgtctgcatctcgcttaccctcaagaacctgaagaacggctctgttaaaaagggccagcccgtggatcccgccagcgtcctgctgaagcactcaaaggccgacggcctggcgggcagcagacacaggtatgccgagcaggaaaacggaatcaaccaggggagtgcccagatgctctctgagaatggcgaactgaagtttccagagaaaatgggattgcctgcagcgcccttcctcaccaaaatagaacccagcaagcccgcggcaacgaggaagaggaggtggtcggcgccagagagccgcaaactggagaagtcagaagacgaaccacctttgactcttcctaagccttctctaattcctcaggaggttaagatttgcattgaaggccggtctaatgtaggcaagtagaggcagcgtgggggaaaggaaacgtggctctcccttatcatttgtatccagattactgtactgtaggctaaaataacacagtatttacatgttatcttcttaattttaggtttctgttctaaccttgtcattagagttacagcaggtgtgtcgcaggagactggtgcatatgctttttccacgagtgtctgtcagtgagcgggcgggaggaagggcacagcaggagcggtcagggctccaggcatccccggggaagaaaggaacggggcttcacagtgcctgccttctctagcggcacagaagcagccgggggcgctgactcccgctagtgtcaggagaaaagtcccgtgggaagggtcctgcaggggtgcagggttgcacgcatgtgggggtgcacaggcgctgtggcggcgagtgagggtctctttttctctgcctccctctgcctcactctcttgctatcggcatgggccgggggggttcagagcagtgtcctcctggggttcccacgtgcaaaatcaacatcaggaacccagcttcagggcatcgcggagacgcgtcagatggcagatttggaaagttaaccatttaaaagaacatttttctctccaacatattttacaataaaagcaacttttaattgtatagatatatatttccccctatggggcctgactgcactgatatatattttttttaaagagcaactgccacatgcgggatttcatttctgctttttactagtgcagcgatgtcaccagggtgttgtggtggacagggaagcccctgctgtcatggccccacatggggtaaggggggttgggggtgggggagagggagagagcgaacacccacgctggtttctgtgcagtgttaggaaaaccaatcaggttattgcattgacttcactcccaagaggtagatgcaaactgcccttcagtgagagcaacagaagctcttcacgttgagtttgcgaaatctttttgtctttgaactctagtactgtttatagttcatgactatggacaactcgggtgccactttttttttttttcagattccagtgtgacatgaggaattagattttgaagatgagcatatattactatctttaagcatttaaaaatactgttcacactttattaccaagcatcttggtctctcattcaacaagtactgtatctcactttaaactctttggggaaaaaacaaaaacaaaaaaaactaagttgctttctttttttcaacactgtaactacatttcagctctgcagaattgctgaagagcaagatattgaaagtttcaatgtggtttaaagggatgaatgtgaattatgaactagtatgtgacaataaatgaccaccaagtactacctgacgggaggcacttttcactttgatgtctgagaatcagttcaaggcatatgcagagttggcagagaaactgagagaaaagggatggagaagagaatactcatttttgtccagtgtttttctttttaagatgaacttttaaagaaccttgcgatttgcacatattgagtttataacttgtgtgatattcctgcagtttttatccaataacattgtgggaaaggtttgggggactgaacgagcataaataaatgtagcaaaatttctttctaacctgcctaaactctaggccattttataaggttatgttcctttgaaaattcattttggtctttttaccacatctgtcacaaaaagccaggtcttagcgggctcttagaaactctgagaattttcttcagattcattgagagagttttccataaagacatttatatatgtgagcaagattttttttaaacaattactttattattgttgttattaatgttattttcagaatggcttttttttttctattcaaaatcaaatcgagatttaatgtttggtacaaacccagaaagggtatttcatagtttttaaacctttcattcccagagatccgaaatatcatttgtgggttttgaatgcatctttaaagtgctttaaaaaaaagttttataagtagggagaaatttttaaatattcttacttggatggctgcaactaaactgaacaaatacctgacttttcttttaccccattgaaaatagtactttcttcgtttcacaaattaaaaaaaaaatctggtatcaacccacattttggctgtctagtattcatttacatttagggttcaccaggactaatgatttttataaaccgttttctggggtgtaccaaaaacatttgaataggtttagaatagctagaatagttccttgactttcctcgaatttcattaccctctcagcatgcttgcagagagctgggtgggctcattcttgcagtcatactgcttatttagtgctgtattttttaaacgtttctgttcagagaacttgcttaatcttccatatattctgctcagggcacttgcaattattaggttttgtttttctttttgttttttagcctttgatggtaagaggaatacgggctgccacatagactttgttctcattaatatcactatttacaactcatgtggactcagaaaaacacacaccaccttttggcttacttcgagtattgaattgactggatccactaaaccaacactaagatgggaaaacacacatggtttggagcaataggaacatcatcataatttttgtggttctatttcaggtataggaattataaaataattggttctttctaaacacttgtcccatttcattctcttgcttttttagcatgtgcaatactttctgtgccaatagagtctgaccagtgtgctatatagttaaagctcattcccttttggctttttccttgtttggttgatcttccccattctggccagagcagggctggagggaaggagccaggagggagagagcctcccacctttcccctgctgcggatgctgagtgctggggcggggagccttcaggagccccgtgcgtctgccgccacgttgcagaaagagccagccaaggagacccgggggaggaaccgcagtgtcccctgtcaccacacggaatagtgaatgtggagtgtggagaggaaggaggcagattcatttctaagacgcactctggagccatgtagcctggagtcaacccattttccacggtcttttctgcaagtgggcaggcccctcctcggggtctgtgtccttgagacttggagccctgcctctgagcctggacgggaagtgtggcctgttgtgtgtgtgcgttctgagcgtgttggccagtggctgtggaggggaccacctgccacccacggtcaccactcccttgtggcagctttctcttcaaataggaagaacgcacagagggcaggagcctcctgtttgcagacgttggcgggccccgaggctcccagagcagcctctgtcaccgcttctgtgtagcaaacattaacgatgacaggggtagaaattcttcggtgccgttcagcttacaaggatcagccatgtgcctctgtactatgtccactttgcaatatttaccgacagccgtcttttgttctttctttcctgttttccatttttaaactagtaacagcaggccttttgcgtttacaatggaacacaatcaccaagaaattagtcagggcgaaaagaaaaaaataatactattaataagaaaccaacaaacaagaacctctctttctagggatttctaaatatataaaatgactgttccttagaatgtttaacttaagaattatttcagtttgtctgggccacactggggcagaggggggagggagggatacagagatggatgccacttacctcagatcttttaaagtggaaatccaaattgaattttcatttggactttcaggataattttctatgttggtcaacttttcgttttccctaactcacccagtttagtttgggatgatttgatttctgttgttgttgatcccatttctaacttggaattgtgagcctctatgttttctgttaggtgagtgtgttgggttttttccccccaccaggaagtggcagcatccctccttctcccctaaagggactctgcggaacctttcacacctctttctcagggacggggcaggtgtgtgtgtggtacactgacgtgtccagaagcagcactttgactgctctggagtagggttgtacaatttcaaggaatgtttggatttcctgcatcttgtggattactccttagataccgcatagattgcaatataatgctgcatgttcaagatgaacagtagctcctagtaatcataaaatccactctttgcacagtttgatctttactgaaatatgttgccaaaatttatttttgttgttgtagctctggattttgttttgttttgttttttaaggaaacgattgacaataccctttaacatctgtgactactaaggaaacctatttctttcatagagagaaaaatctccaatgcttttgaagacactaataccgtgctatttcagatatgggtgaggaagcagagctctcggtaccgaaggccgggcttcttgagctgtgttggttgtcatggctactgtttcatgaaccacaagcagctcaacagactggtctgttgccttctgaaaccctttgcacttcaatttgcaccaggtgaaaacagggccagcagactccatggcccaattcggtttcttcggtggtgatgtgaaaggagagaattacactttttttttttttaagtggcgtggaggcctttgcttccacatttgtttttaacccagaatttctgaaatagagaatttaagaacacatcaagtaataaatatacagagaatatacttttttataaagcacatgcatctgctattgtgttgggttggtttcctctcttttccacggacagtgttgtgtttctggcatagggaaactccaaacaacttgcacacctctactccggagctgagatttcttttacatagatgacctcgcttcaaatacgttaccttactgatgataggatcttttcttgtagcactataccttgtgggaatttttttttaaatgtacacctgatttgagaagctgaagaaaacaaaattttgaagcactcactttgaggagtacaggtaatgttttaaaaaattgcacaaaagaaaaatgaatgtcgaaatgattcattcagtgtttgaaagatatggctctgttgaaacaatgagtttcatactttgtttgtaaaaaaaaaaaagcagagaagggttgaaagttacatgtttttttgtatatagaaatttgtcatgtctaaatgatcagatttgtatggttatggcctggaagaattactacgtaaaaggctcttaaactatacctatgcttattgttatttttgttacatatagccctcgtctgagggaggggaactcggtattctgcgatttgagaatactgttcattcctatgctgaaagtacttctctgagctcccttcttagtctaaactcttaagccattgcaacttctttttcttcagagatgatgtttgacattttcagcacttcctgttcctataaacccaaagaatataatcttgaacacgaagtgtttgtaacaagggatccaggctaccaatcaaacaggactcattatggggacaaaaaaaaaaattatttcaccttctttccccccacacctcatttaaatggggggagtaaaaacatgatttcaatgtaaatgcctcattttattttagttttattttgatttttatttaatataaagaggccagaataaatacggagcatcttctcagaatagtattcctgtccaaaaatcaagccggacagtggaaactggacagctgtggggatattaagcacccccacttacaattcttaaattcagaatctcgtcccctcccttctcgttgaaggcaactgttctggtagctaactttctcctgtgtaatggcgggagggaacaccggcttcagtttttcatgtccccatgacttgcatacaaatggttcaactgtattaaaattaagtgcatttggccaataggtagtatctatacaataacaacaatctctaagaatttccataacttttcttatctgaaaggactcaagtcttccactgcagatacattggaggcttcacccacgttttctttccctttagtttgtttgctgtctggatggccaatgagcctgtctccttttctgtggccaatctgaaggccttcgttggaagtgttgtttacagtaatccttaccaagataacatactgtcctccagaataccaagtattaggtgacactagctcaagctgttgtcttcagagcagttaccaagaagctcggtgcacaggttttctctggttcttacaggaaccacctactctttcagttttctggcccaggagtggggtaaatcctttagttagtgcatttgaacttgatacctgtgcattcagttctgtgaatactgccctttttggcggggtttcctcatctccccagcctgaactgctcaactctaaacccaaattagtgtcagccgaaaggaggtttcaagatagtcctgtcagtatttgtggtgaccttcagattagacagtcttcatttccagccagtggagtcctggctccagagccatctctgagactcgtactactggatgttttaatatcagatcattacccaccatatgcctcccacaggccaagggaaaacagacaccagaacttgggttgagggcactaccagactgacatggccagtacagaggagaactagggaaggaatgatgttttgcaccttattgaaaagaaaattttaagtgcatacataatagttaagagcttttattgtgacaggagaacttttttccatatgcgtgcatactctctgtaattccagtgtaaaatattgtacttgcactagcttttttaaacaaatattaaaaaatggaagaattcatattctattttctaatcgtggtgtgtctatttgtaggatacactcgagtctgtttattgaattttatggtccctttctttgatggtgcttgcaggttttctaggtagaaattatttcattattataataaaacaatgtttgattcaaaatttgaacaaaattgttttaaataaattgtctgtataccagtacaagtttattgtttcagtatactcgtactaataaaataacagtgccaattgcagatgtgtgtctttgccttctgttgggtcctcaaggaagaggccaggaaaagagtgctaattcctcctccttattgacccccgctcacgagttctccctgggtaggtcggaggtagggaggtgtgacatgaggcattgccttcgctgctaatgttttggggggaagagtacgtgtgagatgaggttctaagataaaaggcacacagccacacctgatgtcttggtttcttcagttcatgtttatgcctcctagctgaacactgctgttcacaagaggtatacttgtctttaaacatgtggtagcttcatgcgctcgtgtggcataatctatacactccttacagatttgctctaaactggttagtggtctgtaagtggaaaatttatttttacttcctgtaattcaagctcattagaaattcagcgagcagaccgggcacagtggctcacgcccataatcccaacagttggggaggccgaggcacaaggcctgcttgagcccaggagttcgagaccagcctagtcaacatagtaagacctcatctctacaaaaaatgaaattagccgggtgtggtggcacatacctatggtcccagctacttaggggactgaggtgggaggatcgcctggggccaggaggtcgaggctgcagtgagccataatcataccgctgcactccagcctgggcgacagagcaaaactctgcctcaaaaacaaaaaaaaaacccaactcctcgagcaggtctctcagcatgtggaggaactccccgtttacctcaagagtaccacattacagctttgcactgggcccagtcttggaaagatatggcttagcagttgtgccagaaaaagtaattcctcaagaacccatagcttccaggtggaatcccctgcacccacctcaacccacctcaacccacctcaagaccttccagcctcaaggttacacagaggtgggagaacgcttggggttaaattcattttcacttagccaaggaggaactatcttcttgggaaggtgttttggactctcctctgattatttagttgaggtcctgacacattatataataaatatgtgaaaggacacacagcaaaccagagctgtgtaggtgcaactcaggctacaagggctgccccaggtcctgtggagtagcccgggcaaatgtgcctgtgtgctgtgggcaaactcggcaaagcagtctgcatctctgccttccctttttgtttgtgtgagatactgattgttctgacaagtttggggtccagtggctgtgttacttacctcagctggtgaaatcaattagggggaaccataccttcaggtgctgcagcggggcaggacttgaaaccatcaaaagcactgccagagccctcagatggaacggccagagtggcccaaggcaaatggcgtcgagttcactggctgtcctcctcctcccccagctctggcacaggaagcccagtgggtcagcagcaaagctgcatgcttcatctccaggtcctgtgggacacccggtccaagggacactctggtgtgggctcccccagccccactcctatcagaggcagagatgaacctgctaaggcaaacggtgacggagccttacaagttctctttatgggccaggcgcggtggctcacacctgtaatcccagcactttgggaggctgaggtgggtggatcacccgagcccaggagtttgagaccagcctgggtaacatggcaaaaacccatctctactaaaaacataaacattagccagacgtggcgggcacctgtaatcccggctactctgaaggctgaggcacgagaatcacttgaacctgggaggcggaggttgcagtgagccgagattgtgccactgcactctgcctgggtgacagagcaagacttggtctcaggaaaaaaaaaaaaaaaaaagacattctctttctgaaggctctgcttcaaaatggtcctaacgagtttttgattttgtaactactcagttacaagcagctggaagaccacagagagcaaggcggggagcctgcagccaagccccatgtcttgctccacgttaaatcgcctcttggccctcccgtctccaaagtgcagcccttgtgtttctacaggtgcaagagttattcttaatgggccgggcacagtggctcacacctgtaatcctagcactttggggaggttgacgcaggtggatggcttgagccctggagtttgagaccagtctgggcaacatggtgagaccctgtctctataaaaaatacaaaaattagctgggcgtggtagcaggtgtctgtagtcccagctacttgggagactgaggtcagaggatcacctgagcccgggaggtcaaggctgtggtgagctgtgatcctgccactgcactccagcctgggcaacagagaccctgtctcaaattaaaaaaaaaaaaaaaaaaaaaaaaaaaaaactcttaatggatttagtaggggaaagtattacaatggagacaatgctgctggctggatctctaaacataatcttaaaggaccaacagtgggcctgtattatcccagagtgtgacagctctggttggacccttctcatgccatcggtcactgtggacaatcaggccattcattcaccctggcacagcagcaccctgtggatcttctctactccagggtcattgcttgcctttccaaagaaaactgacttgtgtatctgctcttcagccttattaaaaagcaaagtaaaacaacctgatctgcatacgctttccaggcctggaactcaatacttcaaagtttagcggccggtcatcacttcttctgcgttcactgtttaaacaagcatcctggtggactgctgcaggtcagctgcagaggccaattctccaagacaatgtcattgttcccaacccgttaactgacccttatacagtagtgccatgtggtccttccgagaaaggattcactggcacactgagggaatggctctaactcatgtctcaaaccaatgccttttaggatgccactgatcaaagctttggctctttttcagtgtgactccacctgctaatttcttgggagacaaccttcccataaaacatcctgtggaatttcaaatt

SEQ ID NO: 109 - RNA, 10587 nt, Homo sapiens
  source 1..10587: mol_type = mRNA
gaggagagagcagagtataccgcagacatcatttctactacagtggcggagccgtacaggacctgtttcactgcagggggatccaaaacaagccccgtggagcagcagccagagcaacagcagccgcaagacattgtttctctccctctgcccccccttccccacgcaaccccagatccatttacactttacagagcatcgtgcatcaagtcaccagggtggtccattcaagctgcagatttgtttgtcatccttgtacagcaatctcctcctccactgccactacagggaagtgcatcacatgtcagcatactggagcatagtgaaagagtctattttgaagcttcaaacttagtgctgctgcagaccaggaacaagagagaaagagtggatttcagcctgcacggatggtcttgaaacacaaatggtttttggtctaggcgttttacactgagattctccactgccaccctttctactcaagcaaaatcttcgtgaaaagatctgctgcaaggaactgatagcttatggttctccattgtgatgaaagcacatggtacagttttccaaagaaattagaccattttcttcgtgagaaagaaatcgacgtgctgttttcatagggtatttctcacttctctgtgaaaggaagaaagaacacgcctgagcccaagagccctcaggagccctccagagcctgtgggaagtctccatggtgaagtataggctgaggctacctgtgaacagtacgcagtgaatgttcatccagagctgctgttggcggattgtacccacggggagatgattcctcatgaagagcctggatcccctacagaaatcaaatgtgactttccgtttatcagactaaaatcagagccatccagacagtgaaacagtcaccgtggaggggggacggcgaaaaatgaaatccaaccaagagcggagcaacgaatgcctgcctcccaagaagcgcgagatccccgccaccagccggtcctccgaggagaaggcccctaccctgcccagcgacaaccaccgggtggagggcacagcatggctcccgggcaaccctggtggccggggccacgggggcgggaggcatgggccggcagggacctcggtggagcttggtttacaacagggaataggtttacacaaagcattgtccacagggctggactactccccgcccagcgctcccaggtctgtccccgtggccaccacgctgcctgccgcgtacgccaccccgcagccagggaccccggtgtcccccgtgcagtacgctcacctgccgcacaccttccagttcattgggtcctcccaatacagtggaacctatgccagcttcatcccatcacagctgatccccccaaccgccaaccccgtcaccagtgcagtggcctcggccgcaggggccaccactccatcccagcgctcccagctggaggcctattccactctgctggccaacatgggcagtctgagccagacgccgggacacaaggctgagcagcagcagcagcagcagcagcagcagcagcagcagcatcagcatcagcagcagcagcagcagcagcagcagcagcagcagcagcagcacctcagcagggctccggggctcatcaccccggggtcccccccaccagcccagcagaaccagtacgtccacatttccagttctccgcagaacaccggccgcaccgcctctcctccggccatccccgtccacctccacccccaccagacgatgatcccacacacgctcaccctggggcccccctcccaggtcgtcatgcaatacgccgactccggcagccactttgtccctcgggaggccaccaagaaagctgagagcagccggctgcagcaggccatccaggccaaggaggtcctgaacggtgagatggagaagagccggcggtacggggccccgtcctcagccgacctgggcctgggcaaggcaggcggcaagtcggttcctcacccgtacgagtccaggcacgtggtggtccacccgagcccctcagactacagcagtcgtgatccttcgggggtccgggcctctgtgatggtcctgcccaacagcaacacgcccgcagctgacctggaggtgcaacaggccactcatcgtgaagcctccccttctaccctcaacgacaaaagtggcctgcatttagggaagcctggccaccggtcctacgcgctctcaccccacacggtcattcagaccacacacagtgcttcagagccactcccggtgggactgccagccacggccttctacgcagggactcaaccccctgtcatcggctacctgagcggccagcagcaagcaatcacctacgccggcagcctgccccagcacctggtgatccccggcacacagcccctgctcatcccggtcggcagcactgacatggaagcgtcgggggcagccccggccatagtcacgtcatccccccagtttgctgcagtgcctcacacgttcgtcaccaccgcccttcccaagagcgagaacttcaaccctgaggccctggtcacccaggccgcctacccagccatggtgcaggcccagatccacctgcctgtggtgcagtccgtggcctccccggcggcggctccccctacgctgcctccctacttcatgaaaggctccatcatccagttggccaacggggagctaaagaaggtggaagacttaaaaacagaagatttcatccagagtgcagagataagcaacgacctgaagatcgactccagcaccgtagagaggattgaagacagccatagcccgggcgtggccgtgatacagttcgccgtcggggagcaccgagcccaggtcagcgttgaagttttggtagagtatcctttttttgtgtttggacagggctggtcatcctgctgtccggagagaaccagccagctctttgatttgccgtgttccaaactctcagttggggatgtctgcatctcgcttaccctcaagaacctgaagaacggctctgttaaaaagggccagcccgtggatcccgccagcgtcctgctgaagcactcaaaggccgacggcctggcgggcagcagacacaggtatgccgagcaggaaaacggaatcaaccaggggagtgcccagatgctctctgagaatggcgaactgaagtttccagagaaaatgggattgcctgcagcgcccttcctcaccaaaatagaacccagcaagcccgcggcaacgaggaagaggaggtggtcggcgccagagagccgcaaactggagaagtcagaagacgaaccacctttgactcttcctaagccttctctaattcctcaggaggttaagatttgcattgaaggccggtctaatgtaggcaagtagaggcagcgtgggggaaaggaaacgtggctctcccttatcatttgtatccagattactgtactgtaggctaaaataacacagtatttacatgttatcttcttaattttaggtttctgttctaaccttgtcattagagttacagcaggtgtgtcgcaggagactggtgcatatgctttttccacgagtgtctgtcagtgagcgggcgggaggaagggcacagcaggagcggtcagggctccaggcatccccggggaagaaaggaacggggcttcacagtgcctgccttctctagcggcacagaagcagccgggggcgctgactcccgctagtgtcaggagaaaagtcccgtgggaagggtcctgcaggggtgcagggttgcacgcatgtgggggtgcacaggcgctgtggcggcgagtgagggtctctttttctctgcctccctctgcctcactctcttgctatcggcatgggccgggggggttcagagcagtgtcctcctggggttcccacgtgcaaaatcaacatcaggaacccagcttcagggcatcgcggagacgcgtcagatggcagatttggaaagttaaccatttaaaagaacatttttctctccaacatattttacaataaaagcaacttttaattgtatagatatatatttccccctatggggcctgactgcactgatatatattttttttaaagagcaactgccacatgcgggatttcatttctgctttttactagtgcagcgatgtcaccagggtgttgtggtggacagggaagcccctgctgtcatggccccacatggggtaaggggggttgggggtgggggagagggagagagcgaacacccacgctggtttctgtgcagtgttaggaaaaccaatcaggttattgcattgacttcactcccaagaggtagatgcaaactgcccttcagtgagagcaacagaagctcttcacgttgagtttgcgaaatctttttgtctttgaactctagtactgtttatagttcatgactatggacaactcgggtgccactttttttttttttcagattccagtgtgacatgaggaattagattttgaagatgagcatatattactatctttaagcatttaaaaatactgttcacactttattaccaagcatcttggtctctcattcaacaagtactgtatctcactttaaactctttggggaaaaaacaaaaacaaaaaaaactaagttgctttctttttttcaacactgtaactacatttcagctctgcagaattgctgaagagcaagatattgaaagtttcaatgtggtttaaagggatgaatgtgaattatgaactagtatgtgacaataaatgaccaccaagtactacctgacgggaggcacttttcactttgatgtctgagaatcagttcaaggcatatgcagagttggcagagaaactgagagaaaagggatggagaagagaatactcatttttgtccagtgtttttctttttaagatgaacttttaaagaaccttgcgatttgcacatattgagtttataacttgtgtgatattcctgcagtttttatccaataacattgtgggaaaggtttgggggactgaacgagcataaataaatgtagcaaaatttctttctaacctgcctaaactctaggccattttataaggttatgttcctttgaaaattcattttggtctttttaccacatctgtcacaaaaagccaggtcttagcgggctcttagaaactctgagaattttcttcagattcattgagagagttttccataaagacatttatatatgtgagcaagattttttttaaacaattactttattattgttgttattaatgttattttcagaatggcttttttttttctattcaaaatcaaatcgagatttaatgtttggtacaaacccagaaagggtatttcatagtttttaaacctttcattcccagagatccgaaatatcatttgtgggttttgaatgcatctttaaagtgctttaaaaaaaagttttataagtagggagaaatttttaaatattcttacttggatggctgcaactaaactgaacaaatacctgacttttcttttaccccattgaaaatagtactttcttcgtttcacaaattaaaaaaaaaatctggtatcaacccacattttggctgtctagtattcatttacatttagggttcaccaggactaatgatttttataaaccgttttctggggtgtaccaaaaacatttgaataggtttagaatagctagaatagttccttgactttcctcgaatttcattaccctctcagcatgcttgcagagagctgggtgggctcattcttgcagtcatactgcttatttagtgctgtattttttaaacgtttctgttcagagaacttgcttaatcttccatatattctgctcagggcacttgcaattattaggttttgtttttctttttgttttttagcctttgatggtaagaggaatacgggctgccacatagactttgttctcattaatatcactatttacaactcatgtggactcagaaaaacacacaccaccttttggcttacttcgagtattgaattgactggatccactaaaccaacactaagatgggaaaacacacatggtttggagcaataggaacatcatcataatttttgtggttctatttcaggtataggaattataaaataattggttctttctaaacacttgtcccatttcattctcttgcttttttagcatgtgcaatactttctgtgccaatagagtctgaccagtgtgctatatagttaaagctcattcccttttggctttttccttgtttggttgatcttccccattctggccagagcagggctggagggaaggagccaggagggagagagcctcccacctttcccctgctgcggatgctgagtgctggggcggggagccttcaggagccccgtgcgtctgccgccacgttgcagaaagagccagccaaggagacccgggggaggaaccgcagtgtcccctgtcaccacacggaatagtgaatgtggagtgtggagaggaaggaggcagattcatttctaagacgcactctggagccatgtagcctggagtcaacccattttccacggtcttttctgcaagtgggcaggcccctcctcggggtctgtgtccttgagacttggagccctgcctctgagcctggacgggaagtgtggcctgttgtgtgtgtgcgttctgagcgtgttggccagtggctgtggaggggaccacctgccacccacggtcaccactcccttgtggcagctttctcttcaaataggaagaacgcacagagggcaggagcctcctgtttgcagacgttggcgggccccgaggctcccagagcagcctctgtcaccgcttctgtgtagcaaacattaacgatgacaggggtagaaattcttcggtgccgttcagcttacaaggatcagccatgtgcctctgtactatgtccactttgcaatatttaccgacagccgtcttttgttctttctttcctgttttccatttttaaactagtaacagcaggccttttgcgtttacaatggaacacaatcaccaagaaattagtcagggcgaaaagaaaaaaataatactattaataagaaaccaacaaacaagaacctctctttctagggatttctaaatatataaaatgactgttccttagaatgtttaacttaagaattatttcagtttgtctgggccacactggggcagaggggggagggagggatacagagatggatgccacttacctcagatcttttaaagtggaaatccaaattgaattttcatttggactttcaggataattttctatgttggtcaacttttcgttttccctaactcacccagtttagtttgggatgatttgatttctgttgttgttgatcccatttctaacttggaattgtgagcctctatgttttctgttaggtgagtgtgttgggttttttccccccaccaggaagtggcagcatccctccttctcccctaaagggactctgcggaacctttcacacctctttctcagggacggggcaggtgtgtgtgtggtacactgacgtgtccagaagcagcactttgactgctctggagtagggttgtacaatttcaaggaatgtttggatttcctgcatcttgtggattactccttagataccgcatagattgcaatataatgctgcatgttcaagatgaacagtagctcctagtaatcataaaatccactctttgcacagtttgatctttactgaaatatgttgccaaaatttatttttgttgttgtagctctggattttgttttgttttgttttttaaggaaacgattgacaataccctttaacatctgtgactactaaggaaacctatttctttcatagagagaaaaatctccaatgcttttgaagacactaataccgtgctatttcagatatgggtgaggaagcagagctctcggtaccgaaggccgggcttcttgagctgtgttggttgtcatggctactgtttcatgaaccacaagcagctcaacagactggtctgttgccttctgaaaccctttgcacttcaatttgcaccaggtgaaaacagggccagcagactccatggcccaattcggtttcttcggtggtgatgtgaaaggagagaattacactttttttttttttaagtggcgtggaggcctttgcttccacatttgtttttaacccagaatttctgaaatagagaatttaagaacacatcaagtaataaatatacagagaatatacttttttataaagcacatgcatctgctattgtgttgggttggtttcctctcttttccacggacagtgttgtgtttctggcatagggaaactccaaacaacttgcacacctctactccggagctgagatttcttttacatagatgacctcgcttcaaatacgttaccttactgatgataggatcttttcttgtagcactataccttgtgggaatttttttttaaatgtacacctgatttgagaagctgaagaaaacaaaattttgaagcactcactttgaggagtacaggtaatgttttaaaaaattgcacaaaagaaaaatgaatgtcgaaatgattcattcagtgtttgaaagatatggctctgttgaaacaatgagtttcatactttgtttgtaaaaaaaaaaaagcagagaagggttgaaagttacatgtttttttgtatatagaaatttgtcatgtctaaatgatcagatttgtatggttatggcctggaagaattactacgtaaaaggctcttaaactatacctatgcttattgttatttttgttacatatagccctcgtctgagggaggggaactcggtattctgcgatttgagaatactgttcattcctatgctgaaagtacttctctgagctcccttcttagtctaaactcttaagccattgcaacttctttttcttcagagatgatgtttgacattttcagcacttcctgttcctataaacccaaagaatataatcttgaacacgaagtgtttgtaacaagggatccaggctaccaatcaaacaggactcattatggggacaaaaaaaaaaattatttcaccttctttccccccacacctcatttaaatggggggagtaaaaacatgatttcaatgtaaatgcctcattttattttagttttattttgatttttatttaatataaagaggccagaataaatacggagcatcttctcagaatagtattcctgtccaaaaatcaagccggacagtggaaactggacagctgtggggatattaagcacccccacttacaattcttaaattcagaatctcgtcccctcccttctcgttgaaggcaactgttctggtagctaactttctcctgtgtaatggcgggagggaacaccggcttcagtttttcatgtccccatgacttgcatacaaatggttcaactgtattaaaattaagtgcatttggccaataggtagtatctatacaataacaacaatctctaagaatttccataacttttcttatctgaaaggactcaagtcttccactgcagatacattggaggcttcacccacgttttctttccctttagtttgtttgctgtctggatggccaatgagcctgtctccttttctgtggccaatctgaaggccttcgttggaagtgttgtttacagtaatccttaccaagataacatactgtcctccagaataccaagtattaggtgacactagctcaagctgttgtcttcagagcagttaccaagaagctcggtgcacaggttttctctggttcttacaggaaccacctactctttcagttttctggcccaggagtggggtaaatcctttagttagtgcatttgaacttgatacctgtgcattcagttctgtgaatactgccctttttggcggggtttcctcatctccccagcctgaactgctcaactctaaacccaaattagtgtcagccgaaaggaggtttcaagatagtcctgtcagtatttgtggtgaccttcagattagacagtcttcatttccagccagtggagtcctggctccagagccatctctgagactcgtactactggatgttttaatatcagatcattacccaccatatgcctcccacaggccaagggaaaacagacaccagaacttgggttgagggcactaccagactgacatggccagtacagaggagaactagggaaggaatgatgttttgcaccttattgaaaagaaaattttaagtgcatacataatagttaagagcttttattgtgacaggagaacttttttccatatgcgtgcatactctctgtaattccagtgtaaaatattgtacttgcactagcttttttaaacaaatattaaaaaatggaagaattcatattctattttctaatcgtggtgtgtctatttgtaggatacactcgagtctgtttattgaattttatggtccctttctttgatggtgcttgcaggttttctaggtagaaattatttcattattataataaaacaatgtttgattcaaaatttgaacaaaattgttttaaataaattgtctgtataccagtacaagtttattgtttcagtatactcgtactaataaaataacagtgccaattgca

SEQ ID NO: 110 - DNA, 142001 bp, Homo sapiens
  source 1..142001: mol_type = genomic DNA
ccccgtccctggagctcccactccctcccagacctccacaaaccttccaggcccccagccctaagcccggcaccactgtccacccttcgcggctcctgggtcctcaccgcgcccctagacaaacccggactccctctggtcccacccgcccttgcaccgcttctagccgtctcggccacccacgtgtgttcccagcccaccgaccacgctcccggcacaccctatagccccgcgctgcctccgggagagcggacggggaaagccgagggtctccgaggggcgctcgggctctggcgagaggaggaaggactcagggaagcagccggggaggcccggggctccggggagaggtcgggaaggccgaagcgctctggcgaagaggccggggaggccgaggggttcccggaagcgggccgggaggccaggggtctcaggggaggcccagcgggccgtgcagcgggcgcgtgtggcggcgagcggggcctcaccgtcagtcacggctcccatggcgtgcgcggcggcggcggcggcggcggcggcgcaagctgaggcggcggttggcggcggcggaggtcaaactcccacaatgcagccgggtaaacagccatggaggaggaggcggcggcgcccgcggccgcctgctccgacgcctgagccgcgccgcgccgcgccgccgccgccgccgccgccgccgcgggacccgcgctccccgcgctcccggtactccccgggggcggccgcggccggcgcgagttggggcgaggcttggcggccggcggcggccccggctgcagcccgggctcccgccgccccccttgcagcccccgcccggcccacgcccagaggccgccccggaggccgcagccagccgccaggtgagctcgcccggacgccgccagggctgcgggggtgcggcgggagctgcgggccgcccgcagtcggggtcccggcttcttccccgggaaggtgactgcggccccgccgccccatccagggtgacgctgctaggggtgggctcgtttccctggggggtggggagggtgacggggacgcccggatccggctgagcccaggagaggcgggactaggggtaccgaggggggcgcgtcgctgggggtccccgcgaagttggcgcccacgcgcgctggggcgggtctcgaacgccggcacttgcgcggggcgcggccggcaatcaaaaaaggccccgggttccaggtcgcgcggttccggcccctgcggccgcccccttccttcctgggctcggcgggtgcgggaaaaagggtgaaagagaaacttggcgacctcccggaggagttcgcgaagcgaccaggagcgtgttgccatcgtcctcacccggcacccaattccaccacagagtcgggatttcgtcggtgatcgtgatggggtgcttttatttttctctttgattttcaaaaaatgtctatgtgactgtccctatcttaaggggaagttgaaagtgggggcgggggtgctcaatgagaaacgttgccttgtgtgtagttgtttggagcacactgcaaattatattggcatctctttccaaaagtcactttgattcaacttcgatagctttctcgtaaatggcacgtttaggtggtgagaggtggatgaggaaacaggcaccagtgcagctgatttgacctccagtgggatagatacgattagcaccaggatcgtgtctcattttgaacccaggtttgttattttattcagccataccgttgttttccaattttcctgtcccccaagtagatcttgcatcttcatatccgggatgaagaagttgtgtaggataaacttggttgtttcactttccttactaaatttaggtacattctccctgttttcccccagttctttcaaagaggagaagttgcagatgcaaatgtattaaagtgaagtgtgtttaacctctagcaagaaatatgtacaattttagtcatattatgtgagaccagtgacttcaataataccattacagtgctctcaagaattagtgctcaagaacttgacttttgtcacaaagacaaaaattactttacatgaagattctgagatgtgacttgctctcccctaaggtatgaagtttccgactttgaaaaaatactgacctaaacgctggctgtaggtgggcatcatcagaccctgttcatttccttggttttaggagacagggcactctaagagaagaattgttttaaatcttaagtactacagattgtaaactgaaattgtcaattgattggggttcacaataccaagttgcattttggtggggatagttattgtttagaaagtaattgtcggccgggcgcggtggctcacgcctgtaatcccagcactttgggaggccgaggcgggaggatcacgaggtcaagagatcgagaccatcccggctaaaacggtgaaaccccgtctctactaaaaaaaaatacaaaaaattagccgggcgtagtggcgggcgcctgtagtcccagctacttgggaggctgaggcaggagaatggcgtgaacccgggaggcggagcttgcagtgagcccagatcccgccactgcactccagcctgggcgacagagcgagactccatctcaaaaaaaaaaaaaaaaaaaaaaaaaaaaaaagaaagtaattgtcatgtggtgaaaagttttttttaagtgtttcttaatcttatcataatactgattttgaaacagtgtcagtgatttaaaataatctgtaatattttcatgggaaagtatcactgccccctgtaacttaaattttcgtgagatactctctgagttattcataaatggagtgctgttcaaacatttctataagttaatttgataacctataattttgttggatgatgctagaaattttctggagtaataagaccaagaggaatttgaaagactttaaagtttgagctgtacctgaaaataaacattcctgaaagttattttatttttttttgagacaggaccttcctctgttgcctaggctggagtgcagtggcacgatcatcagggctcactgcagcctggaactcctgggctcaagtgatcctcccatctcagcctaccaactagttgggactaccggcatgttccatgatgcctggctaagttttttatttttatttttgtagagacatgatctcactatgttgcccaggctggtctcaaactgctgggctcaagcgatcctcccgcctcagcctcccaaagtgctgggattatgggtttgagccactgtgtccagcctgaaagttcttgactcaagtggtgggaaacacataatttgagcctttatgaactctaaaatctattttgtcagctacatgattttacttgcaattgcattgacacagatctattcattgaacatttaagaattgtcttttcatcatatcgtatatctcatatatatgagagaacatcttttagtaaactttacaagtggtcttctttttacatattaacatgttgatgaatgttaaagtagcaaagactcaagcccttaccatactaatgtttcttcttttcaagacagatctttatgggcagaaacacagaaatggaagtagcagattttaagaaaactgattcagactttgaacttgtatgaccttatatttattgatttatttgagtcataagatttctgggtttttttttttttgagaatatgaaagactagttaagaaaatttgtgtgtttatttgatatttgctttctgaaaatataaaaaattatgagagagctagctatatatggtctttattctgggtctgtgaaataatgtaaggaattttgtactatgcttttagagcaagagttatcctgggggtctgtgaccctccaagggttggtttcaagggattcctgaactccctgtagttgtgaccagaactttttgtgtatgtgtatttttctggaagagggtctgtagttgttttagaaaagagatccaggacttaaaaaaattagagacacatctttttattgaataaaatggaagttagaattcttttcttttctttcttcttttttcctttttcttttgaaacagggtctcactttgttgcccagtctggaatgcaattgcatgaaactggctcactgcatccttgacctcctgggctcaagtgatcctcctgccacagcctcccagagtgctgggattacagtcatgagccatcacagaatgaccattctaaagagaaaaaaacatttttgaaaagtagatctgtgtgctcgttacttgccttttaaagttatcttcaggctgggcacagtggcttatgcctgtaatcccagcactttgagaggccaaggcgggtggatcatttgaggtaggccgaggcgggtggatcatttgaggtcagaaattcaagagcagcctggccaacatggtgaaaccccatctctaccaaaaatacaaaaaaaattatctaggcgtggtggtgtggcctgtaatcccagctactcaggaggctgaggcaggagaatcacttgaacccaggaggctgaggttgcagtgagccgagatcactacactctagcctgggcaacagagtaagacactgaaataaataaataaataacaaacaaataaataaataaagttgtcttcagacttagaggtgtaaaagcacttccattttattcccacaacaaagcattgcctatcagttgataagccaagctggtctgacgtgctagtcctgcatgtactgtggctgtgtttttaaaaaattatatctaaaaattcagaccagatcgtttgatggtagataagcaaagatttgatcttgacaccagccgttggagtaaatgggtctttcagctccactctcttctctccagaaaatttgaaatttgactcaaagggaatcattgtaagaaaatgtgtttgtgccttggcaggacagtagaacatgatgggaaaaacacagtttgagtcaaaatagacttaaaattcaaatttggtttcctttattcactgtagctacttaccctgcttgactcttcagttactcatctggatatggctaactagtagagttgttgggaggctagctagaagtttcccgtataaaagtcttagctcctctttggcccgcaagaaggacttacaagccaggtttggggaaccattaataaacatctgaggaaacatgtatattcatggtataggataataagtacattatttccaaattggtgtgatgaagatattaacacttaaaacattgttttttaagaaaaagattttcaaaaatgagttaggattgagtggtccccaaatatagatatttagaggaaagtggaaaatgatggtttatttggcagaggggaggacatggatgctgctgggcaggaagaaatgatagccacccaccagcattatatttctctctgtgggcaagattccatttaacattttctcttcacttataatctgaattaaaaaactaaaatactgcacatgtactttatagtccatcacccctaaaagtgcttcagcactcctttcgttttgagaccttcacaggtaacccagggacttcatgggtggaagttacacttataactttagttgtctaattctgctgtctttaaaatgccttcacagttgggtacctgtgttgatttttgtcaataggaaagggtctggcaggactgaatcatattttactttaaatgctgaagtaagagagggcattatgagtcaaaagaaagtgtgagatacgtaaataaaatactgtataatgcttatggccataaaaataaacttgcttctactatttctatagtcttaacctttcctgtcatttattcgtggtgatcatttatgctttctgcccttgggttgggaaatggttatgaacacagcctttaggctttgaatatggccttgattctcatttcctgagctctctggttgtgttcaacttggtccagtctccttctttgagtctagaggagatgaccattaaatgggataataaatgcaaaaaagttttgcttactcctaggctcctagtaagtactcagaaagtggtagccattttgaagacagttacattctcatctttagaaggagatatcatacatctttttcttttcttttctttttgtttttttttgagacagaggctcattgttgccaaggctggagtgcagtggcatgatcttggctcactgcaactcctgcctcccagggttcaagctattctcgtgcctcagcctccctagtagctgggattacaggcatgtgccactacgcccagctcatttttgtatttttagtagagatggggtttcgccatgctggccaggctgatcctgagctcctgacctcaggtgatccacctgcctcggcctcccaaagtgctgggattacagctgtgagctaccgcaccctgctagagatactatacatccttttaaagagaatacctttattcatccttattcccacttagaccttctggaaccatcttactttcaactcagaaaagccttttacattttcttgttatgataggcaggtatcccaacatcttgatgacctattggacttctccattgttcttagccaatggggttgcattctctattggcctggcaggttatatcaaaatcttggatatgtcaggggccaaaccaacaagcctgcacaggtttggagctgtgatccatcaaacaactgtgtgattttatagcctggaacagagatcagcaaattttctgtaaaggaccatatagtaaatattgtttactttgccagccatccaggtctctacacctactcagctctgccatgatagcaggaaaacactcatagatataaatgaatgggtatgactgtgttccaagaaatgttgatgaacactgacatttgaatttcatgcaatttttatgtgtcacgtcatattttattttttcaaccatttaaaaatgtgaaagtcattcttagctcctgttatatacaaatcttagctagatttggtccatgggccataatttgcagaatccttgcctagaatattagatgcatagatttgtggcattgccaagcaaccacccccaacatgtgcacacacacgtatgtgtgtgtgtgctcacacactgctgttttatttagcatactctgcttttggtatggcagtttgatctaatgcctcatctctttggataggatgaaacttcagtcaataagtttttattagtcatattgtgtggccgccttagcacatgcatgattctgtcaccaattaattttatttattgttaagtgttctcaccttgcccatttttttatagagcttgatgattggaccctctcagatgtgatggtttttgaagggaatcagtgcttttggagctgtcttttgcttaatgttcctattaatccttctttgccgtggaagggaagtaattaatactggcctctcaagctgctaactagacattctttcctaaaggaaatctgtatcctggccttccctattccctttctgcatgatatgtttggctttataaagcacacaaaaattcctcttgtgttctaacccctggagattagctctaggattggtgtgtacagagcatgtagatatatatgtctgtgtgtaatttcatccggccatcactgaagctctgagggctgcttcttttagtttcaccttttcactccctctacctttctctcctggccattgtgtaaggatgcagatttggtgacctgataactgctctaactgattggtttattttttgcttcgtttcctgcttttcaacattctctactgatttgcttattttgcagcaagtacactctttttggagtttaccttttcaaaacaacattgtgctgaaaataaaaccactagagattatttgggtattgtaggatttttccccctccaaatgtacagtaaatacagtataagaggcatgactcagtattttagatatagaatgcaatttaaaaaattgtttgccattttatatatagatattagaggtgtaaaatgtgttcttacttttagcatttaagggtttccttcttgttaaaaaaagtaaatttgctacgtatcttttggataacagtttgggcaatatgaacccaaagtcattacaaaaaaagaaaaaaaggtaaattcacatctaggaatttaaagaaacagttggtgaagtatgcacagatgtatgtaccagattgctcacctgtcctttttttataacaaaacatagaaagtgatctaaatacctatggataggggattaagtgaattagggcctatccatgtagtggaatatgctgcaatctttaaaaagaatgatgcagtcaatatttattcatagaaaaaaaggtatataatgagactatgtataagatggaacttttagaatagggttttagtcatctttgaagtatatggaagaaaatgccaggagcaagaattgttacaggggagaatctgttttaattattaaattataatctaaaactataattttgattattaaacattattataatctggtttgtttttaaatttaaaaaaaaaacagattataatttaatgctttaattatcaattaaattgttccttttttttccttagccagttaccttcaaattcaactcacctttatttgcacctgcatctttgtggtttaactatgataattttagcaaattttcacttcagttattttggctttggagtatgttctatctcctatgccccacattctggtggagatacagttcattgtttatatgaaattagcaacattgatctagccttgacgaatgagaaacgtaaccacatctggctgtgacatagtgactctttgtggactttgggccttagagtttgttataggaaactttaggacgtgaatacactataaaatatagaaatattacgataattcatgaagcatgtctgtcagttatctattgttaacaacccattccaaaagtttgtggcttaaaacacataccattttatttgctcataattagggcagagcagttctccattggtagtgcctggcctgaggtcactaatgtggctgcagtcctcttaagtcttgagtcagaactagttagtcaagctgggctatctctctgagctccacataatctcatcttctagcagcctagatcaaatttcctcaggtggaggcactttgttccaggagggtgagaactgcaaggtttctggaggcttaagcttaagagtcacacagtaccactctgccatattctgctagtcaaagcaagtcacaaggccaactcaaattttaggagttggacaaagataccccctcttgatggcaaatgctgccaagtcatattgcacaggatagcctacagggaattgttgcagccatcaacatatgtgccaacctgcttttgttatagtaactaaactctgtttgtttgccatgattgataaaactctgttctgaggaacagtgctaaatggtttcctgtgttacctcttgggataacagctctacatgtaggtagtattatcccattttaaaggtatgaaaagtgagccttagaaaggttaagtaacctgccctagagcttttatctagttagggacagatcttaaaagttaaggaaaatttatgtctataccagtgtttcttaatcccatcactaaagaacttgcatgggggagggagagaggaagggtgggaagtgggaggaagcgtagtttttaaaatctcaaaatccattatcttaaaattttacatgaattttgtattctactctataatatatcccttttcaatgtgaaattcatggtttaattacttgccaatcaaattaaattttatccccccaatttttaagaaaatgcaattcttctagacacagtataacagctaatcagccagagatctttggttgtaagcagtaagaactaaatctgactactttaaacataaagagattactggagggatgtggtgacaacaatgccaaagaatcaggcttcagagtgaaccagatctagagcagcttcagggatccaggtagcaggactcagtagacagtcttctcaggatacaggagggccaacctctccagcagtttttaatcccactttctactgagagtatatctttcaggcccatactgggtcccagcaggtgccttggttattgcctcactcagccagtaccctttaggggagttgtcattccccagaagtgggaattgatggagggcaggtaaaaccaacagatatttactatctgaacatttgtgggccactatgagtggacttggtttagacattgtatcacatataagcgacaccataatgatccctggttcacccgtctccttcccaaccctacatctaagggttttgttttgttttgtgtttgaaacaagctgtccttctgtcacctaggctggagcgcagtggcacaatcgtggcttactgcagcgttgacctcctggcctcaagcagtcctcccactgcagcttctcaagaagccggggatacaggtgtgtgccaccaaacctggctaatacattttttttttcttttttgtagagactgtgttatctagactggtctcccatttctgggctcaagccatcctcccaccttggcctcccaaaatgctaggattataggcatcagccaccacacctggccccgaggattcttaaactcccatctttaaaagcattcttgtggctctacactgtctatttccatttaaccttactggtacttaccactctaaatgcaatactacatgtgttttttacatgataatctttcctaaaatatgcattttcctcatttttaaagaaaagcatatagactctaaccatttgttggtaacagagtcactataaacatttttatccagtgcatagtgatccccttagaacccagtgagataaagtttatggtctctgcactaaattttctcaaatttctctgcatttatttttcggtcttcttgtgtctaagtgctttcactgtaactttgctaatactttaaaatacgcatgttagactttataaaagcttataggctgaaggggcaacttacatttatttggcctttgtaagtatgagttaaaccacacttcaaatgataaaatgctgtgcatatacagtgtgattttatacagagcatttgcacgtatgttctcctgtttcattgtatattccaatcctttgaagtcagggaagaggagatattttctctatttttcagctgaggataaggtttagaaagggtgatttcccctccaacctaagactactgcagaattcaggtgttctgattgcccatgccttattgagggtggttctagaacagtggtttactaactgcagaagctccttttctggattctgaagtttccaggctgaactggagatgggtaaactaatgtttggcctcatttgagtaatgttccctaattgtagtgacgttggtgtgtgtcttagtctgttcaggctactctaacaagataccataaactgggtagtttgtaaacaacatacctttgtttgtgacagttctgaaggccgagaagtccatgatcagggtgccagcagattgtgtgtctgatgagggcttgtttcctgtttcatagaaggtgtcacatggtggaaggggcaaacaagctcctggacctctttcgtaatggcactaatcctattcatgaaggttctgccctcatgacctaatcaccctgcagaaggtcccacatcctattaccataacttggagggttaggattttattttatttattttatttttattttttgtagagatagggttttgccatgttgtccaggccggtcttgaactcctgagtggcaagtgattctcccacctcagcctcctgagtagctgggactgcaggtgcatgccattacacttagctaattttttgtgttttttgaatagacagggtcttgctatgttgcccatgctggtcttgaactcctgagctcaagtaatcctcctgcctcagcctcccaaagtgctgggattacaggtgtgagccactgtgcccagcctaggatttcaacatgtgaatttgggaggacataaacattccgaccatgacagtgtgtaatggtggtgtctagtagtcaccttggtaattagtagctgctgctgtttattcttgccttggaggcccagcatctttttatttccccacagatagccaggtgaggagctgatttaccccatctcttcttgccacaattagctgggtttgaagtacctcttggagcccttcgatctggccttttttatttcttttccctgtaattaccactttgtgatgtagtcactcgtcctttcagcccctggactcttcttttatatggtcctggctgttttctgctgacaggtctatcactacaagaggttttgagaggagcacttgacacttttgtttaattaaggtctccagacagttttctgttaatagcagggttgtatgttaggctctttccccccattacttttaaagtttcattgtagtctggatcataaacttgtctgtggtggtaatatggtggttcttgtttggccagacctttttgtaaatacacacatcccaagacttctgtagcttttggaaccttgttctgacatttaacactagttttaaagttgtctttttctaatttgtttcaggcactgatttctacagcttctaaccatgttttgataagcactagtcaaaaaactattttttcctcttgcatttttagtttgtttgttttttgtcttatggtttttgtagatactgtgagcctttggaatccttcaacttaattctgaaaagaatgcgagtaaagttctacattgaaaaataagtatttttcatttccttatacttttttcactggcatttttaagttttagcatactgaacagaaaggcatttttagtgttctggctcatagctcctcttagctgctctaagaggagatatttaaggctcaattctctgtgtcctccactccgtaccctgtttattattattgtggtagttataactataaatcatttgcagatcgaagttagaaaagagaccatttgtcattacattaagacagtttaaaggaatcgcttgttcaaatttactagcttcctgaagctagtaaagatgtttatggtttccaagattccctgttaatatatttcaacactacaagacagtgaataacacatgttcagctattatagattatgaggaaagctagctcctagaaaagatttttcagtactataaatggcactaaactgaaaaatcagttgtcataataaacagcggtcctgatctgagagtaggcaggtttcttggtgtgtctgtgcttttagctaatggccagcaatgagtagctctcttttccataaatctggtatcaagtattaatcagctgtagactggaaagtttttatttgctagcatttgtagtggaggaaacaccagtctgttttatctgtctcttagccatataactgcatatgatatcatctgcatggcgttcttacagagagaaatagttgtattctttttcatttgtagtcggagtacttcagaatattaaaatagtgaactttgaccttgaagcatctaaattgtctcagttaagattgtgatgtataccagaaaaaatttacaccttaaattcaatttagcattcttgttttgcacattttgaatggtttttttaatttaagagcaaagtccatagaatgattgtactattgaaaaatcttaaatctcaaaagctaagaaaggtaatttagattttaagtttcaagaattacataaatttgggtcttaaggaaaaactgaaattcctgaatgcttacagaggtttttgtttaattttttttcgtgattacagaaatcataagtgtttgtagaaaactcagaaaattccacagatagaaggaaataaaagttactcatacttctacccagagatatcactattaacattttatgtatatccccccagctgcttatagagttctccaataaaatatactttgaaatgcatgcttagaagtaagggtagaagagtggtagaaatgggtacatagtgtgaaccaaattttgttaatcctactgcttgtcagactgcccgccaggtgttgccttcaggctgatgagagctgcctggccctttggccagctttggctgatttgcagcagagcatcttttcttagacaactgtctatatctgtctgtgtctttatcttagcaactgtttcttgtcagctccaaatgcctgctggttgcagagagagacatttggggtccttgttggagtggcttattgatatgagccataagttcttatcaaccccgtggaaaaattctttaaatcagctcttattcaaaagaatgcccgaatattcacaaatatagtatccttcagattacttgcaccaagtaacagcaaggtatttagagactcccaggtgatttcaattaacatctaacctcaaatccggtctccttggtaagagaaaaatccagagaaggagctcaaagcagattatggtataagcatatgccagtcctctcctgtggaaaaagaaaagtgctaatctggtcagaactgttaaagagacaggcaaggctgagcacagcagaattctctcatcctgttcatcttttgcattagtgcagaaaaaagatttatctcaggatgaaagaaagaaggaaggatggcaggcaggtggctagtaataggagatggttggttctcttcctctctgcctgggctagtggtaagcaggtcctcaggtctgaaaaactagtaaaagtgaagtgacacacagggcagcttccccaggcagtgatacaacttgttggtattcagtgtgaaaatacaaagctgactttgattccttgccatcagccagaggaaaccctggagaagtaggaggcagtggcatctctttgtaaacattttattcttgacaagtaacagactcctacctagagaattgtaagcgttggcccctccattctgccagctgtctttcaagagcactctcagtattctcctgcactgaccagtttaaaaggtgtcgtttctgctcccatgcagtgcttggtgtgaaggaattaatttgcaagatgaataaccattgtgataactgctcacatgcaaaggagagagattgctgattttacaggtgtgtggtttgctttcttagatctggcaggaaacagagtccaactcagatggtttaagagactttaaatgaaagaattattttcagaaggacgggcagagttcaggatgacatgggtttctgtcacctagaaactaataggaatggcaagctgttatcactgctagatctgagggagcaaagagaagaaatagtgttactggagtctagtgagagctggtgccatagtggatgggctgttaagacaggagctatagtactagaggcattcagccactgccagaaaagggagcccagagcagggagggaacaaggagggaatattctcctctctgacttttttctttgctctttgatctttttccagtgccttctattggccagactcacctggaagctggccagcaggtgaatctatgatgctgcccatagaggtcagcctcttgggactcagcagggcccagtatggtggaaagttggtctgggggtggaaagtggatcagacaaaattataccataccctatagcatattcttaatttcactttcatcattttatctcatcatcctcatctcctgaaatcccaaaataaaccttaaagcatgtgaactattgattatgactcagttctatcttttaatataaatagcccaaagagttaccctactcttatcagagaaattaaatattcaaagagagaatctgaacagttctcagaagaattggaaaatcactgaaagaccttctgttggggcattttgttcttggttaaaattaaactaacatttaaaaaatatgcatatgaactgtacaagtgatttatcttaaaatataaaacttgtacttttaatgacacattgctgaaatgtgttttttattattaaggttaaggtgcaaaaggaaagtgcaacttaagtccttatggattatctcttcagtttttttttttttttttttaaatagagtcttgctctgtcacccaggctaaatgaagtacagtggcgcgatctcggctcactgcaacctctgcctcctgggttcaagcgattctcctgcctcagcctcccgagtagctgggattacaggcgtgtgccaccatacccagctaatgtttgtatttttagtagagacggggtttcactatgttggccaagctagtctcgaactccggacctcaggtgatctttataaggcagagtgaattagcaaaaagattcttattccaccgatctagaaatacaagaacagatgtggccagtcgcggtggctcatgtctgtaatcctagcactttgggaggccgaggcaggtggatcacgaggtcaggagatcaagaccatcctggataacatggtgaaaccccatctctactaaaaaaaatacaaaaaattagccgggtgtggtggcacgtgcctgtaatccctgctactcgggaggctgaggcaagagaattgcttgaacccgggaagcaaaggttgcggtgagctgagatcgcgccactgcactctatcctgggcaacagagcaagactccgtatcaaaaaagaaaaaaagaacagatttttagcttatcaaaagagagtctgttttagtccataactttattgagttttgaggtttgagaaatgggaagatgaatatttactctgtaaatatgaatggtgaaaagaggtccacacttacctataataattggtgctttaataaaagcatcagctgtgggactaaaaaagagggaaaagtgatgtagtctgtctttatcagagattcttttagacaggtcacaaatatttatcaaaagtctacagttgccgtgtcctagaagtacagatgaaaaaagtgccagatagccctgactcaaggagttggtgtcagagtgagcctttcattgctgtttccttaagggcagccagtcttttggtgcctttccattgcctagaggaaggatgatatccaaaactttgaacagatctttcagtggtcctctgatctggccctgcctgcatcttctgtctcaccaagtgctctggctttttagttccttgaacttgctgttcttcctcaatgtcttttctactgagatttcatttgtctggggtgcttgctgccaccctcatctccctcatacctttttgcctcctttaaatgccacctcttcacagaagccttccctgaccttctagacaaaattcagtgactttgttacttgctttaaaaccctgtgtattcagacacgccgcccttctcattcaaagcactctttcaatttatttgtgtaaaggttttatggctttctttcctactagaagtaaacaccatgagaacagcgttcattgctgtctgtttcacagctgtctcctcagtgctgagcatggcgctcaatagatacttgcaaaaaagggaaaaagaactgctttcaacccaacccctactactcaccagttgtgtgacctttagtggtttgcttcttggagtcgcaatttgttatctgtagaatgggaataatgatgataatggctatcatttattgagcagttagtatgtgccagactgtgctttacttgcattatcttttcagttaaaccccatcagagaagtgaaaagatttgcttgaggtcacatagtttgaaaatagaaaacaggatttaaactctggtctgtttaattcaaaaaaatggattactcttagccatgcctttttgtgattgagtagtaccaatgctgagaatgctgaggttgaggagggagtaggtttggaatctcctaaaccattttagggaatcggtatgggattaactctgcctatttgaagagataagtgacctctaaactgatttctgaagaagttagttgggtctagaagcagccagaagtgcaaatactctaagagaacttttcagtgtgctggaaactggccttgttcattgtggttggagcattttttttttttttttttttttgagacggagtctcgctctgtcgcctgggctggtgtgcagtggtgcaatctcagctcactgcgacctctgcctcctgggttcaaatgattctcctgcctcagcctcctgagaagctgggattataggtgcccaccactatgcccagctaattttttgtatttttagtagagacagggtttcaccatgttggtcgggctggtcttgaactcctgacttcgtgatttgcccgccttggcgtcccagagtgttgggattacaggcgtgagccactgcacccagccgcttgattggagcattctacagggctaagaactataaggttgggccagagagtaaagtaaaggggcttaccggctgctgggccaggctaggccagggagttactttctgctaaacactgtggggagtccttgatggattttatttgttgaaaatactttggaagcaggaagtcccaatttggagtccatcttgggggcagaagtatccaaagcccttctctcagtttgcatctctagcaaagaacacattttaactaataatttcattctgctgcacccagtgtgacagtgtttgaaaaggaaccagcattgtgaggtgaggaatggatttttatgtttagttgcagcagtataattttgctgctgctgttactgttttcctttggggacagattccctaacccagatggatggcaaccttacacaagttacttcacctctctagcctgtttctcatctggaaattagagatagttaaaatatctatcttgtcagcttgtcgtgcaacatttacacagtgcatggtataaaatgaacttttaggcaacattaacggttattgtttttaatatgacctatccattctggcctttgattcttttttttttttttttttgggtcggagtcttctctgtcacccaggctggagtgcagtggcacaatcttggctcactgcaacctccgcctcacaggttcaagcaattctcgtgtctcagtctcgcaagtagttgggaatgtagacatgtgccaccatgcccagctaatttttttttatttttagtagagaccgatttcaccatgttggccgggctgatcttgaatggctgtcttaaggtaattcacctgccttggcctcccaaagtgctgggattacaggtgtgagccaccaaacttgacctctggcctcttaaatgaatatgtgttgtttatttatcagacaggttgattgggacataggtgctgacatttttaaagatcatgattttaggatcttagaaagtaaaactggcaattaaaaaaggcaacgaacaccttagtgaggcagttttggtgtttcctagatgtgtttaggatgaacacatagatgaaatgcataatatgaacatgagccagtacttaaagagctcgtggtgtgtgccaggagtgtgttttccatgcattcttcctgagaagtaggtttgattatacagtatctattttacagataaaggttgaggtcttttctttctaaggtgttattagacagctatagacatggacaccaaaacttgttgagccttcagcattgtaaaggcttggcttaccttccatcaacctcagcagttctgctggaagggaaaaatggaaacagggcccttaattttttctcattattggattaattggaagcactaggcatggtgtgctgcctggtggatagtagaggctcagtaaatgtttattgaatataaatctgaatcagaccaagtgaaaaaaagatagagaaaagcagtattagatcctggccccagactttaaaaaagtctgaggtcaccagagattttattagcatagtccatttgttaatattgcaggttaatggttggttgaaggctgaggtgaagaattgtccagtgtgtgttgcatgggattaactccagtctgggcaatttagttatctctagaaatctgttcacttcccactaggtacccctgctgctcaagaagctccaggctctgtgtttgtgttcagctgattcatttattcccaattaaaaaaaaaaacaaactagttgtaacattaaaatatgcaaataagataggtgtgactatcctaaataatcctatgtaactattctatttaaacataaataggaaggtataactgccataagtcatcacgagtgtatttcaaagccagatctgattgatatttctgtttacccttagctcaggtaattaagagttgacaccaaggaagtatcatttagtattaaggggagaaaataggataccttattgcatagaatagcaaacaagtagcatttaattctagatttcttcttgtttcccccaacaacagaaaaaaaaatatttttttctcctgggggaggttgattaggatatttatttaccctgtcaaacctgaaagtcagatggtagcctgattaccaagcttgattgattaccaagcatcctttttgtgatttattattttatgccacaaaaggaagatacttgaagagataattttgttcatttactatagaagtagttcatgtagaaattttaaagtgtcaaacattaagacccagtgtccagatcttggtttctaataccattctccattaaaaggagattctgtgcctgagacagggaataaacaatatgagcctgtagtatcttctagctccagaaagtaagaaaataacatgcgcacacacacacacacacacacacacacacacacacacatactctcacacacacacacactcattcactctctctctctccacacacaatgatggggtgtgtcagagggaccaaagagacaactgaaagagctcccaaaggtcaaacctagaacaatttgagcagctaaaaaacatagtattagattgtaacccaatatataaaataaatgtaaataaaatatacagtatatatatttttaaaggctcatataaacatataaacaaataatatgtgatataaaatcataaatatccatgaggccatactggtataaataaatggttggataaataagcaaatgggagagaatagataaatctttaatataaaagaactccaaatgatttatgcagataatcatctctcaaggagatggaacatcactgccaatctttttttttttctttcttatttttttgggggggatcaggttctccatctgtcacccaggctggagtgcagtggcacaatcttagctcactgcaacctctgtctcttgggctcaagggtgtcttcccacctcagcctccgagtagctggaactacaggtgtgtgccaccatgcccagctaattttttttttttttgtattttttatagagatgggattttgccatgttgcccaagctggtcttgaactcctgggctcaagcgattcacctgcctcagcctcccaaaatgctgggattacagttgtgagccaccacgcccagcccactgcccatcttttaagtctgagctgtgcctagtgacttccttccaaagagtgcaatatgaaaagggaggaaagagacagcttcctgacattggcctgggcagtgactttttggatatcaccccaaaagcacaggtaaccaaaaaatagaaaaatggggttgcatcaaactaaaacagcttctgtataacaaaggaaatagtcaacagagtgaaaagacaatcaacactatgggagaaaatatttgcaaaccatatatctgataaggggttgatatctaaaatatataaggaactcaataacaaaacagataacccaattaaaaaaggagaaagaaactgaattgacaagacgtacagatggccaacaggtatatgaaaagatgctcaatatcactaatcatcagggacatgcaagttaaaaccacagtgagatatcacctcactcctgttagaatggctattcaaaaagacagaagataacaagtattggttagtatgtggagaaaagggaatctttgtacattggtagtggggatgtaaattatagtacagccattaagaaaaacagtatggaggtttctcaaaaaattaaaaatagaaaagaactatatgacccatcagtcctacttctgcatatatatccaaaggaaatcagtatgtcacagaggtatctgcactcccatgttcattgcagcattattcacaatagccaagatatggagtcaatcttggtatccatcaatggatgaatggatacagaaaatgtgatatttaggccaggcacagtggctcatgcctgtaatcccagcactttgggaggccaaggtaggtgaatcatttgagaccaggagttcaacctagccgggccaacatggtgcaaccccatttctactaaaaatacaaaaaattagcagggcatggtagcatgcacctgtagtcccagctacttgagaggctgagccaggagaatcgcttcaacctgggaggtgaagtttgcagtgagctgggatcacgccactatactccagagcgagactgggtctcaaacaaaaaaaggaaaagaaaatgtgatatccagtgtatatatgcaaataatgtaagactgttcagctttaaaaaagaaggaaatcctttcatttttgacaacatgggtgaacctggaggatattaagtgaaataagccagacacagaaagacaaatactgcaggaatctcacttacatgtggaatctaaaaacattgaaccacagaagcagagagtagaataatggttgccagaggctgggagttgggggagtggtgagggaaatggggagatgttgatcaaagagtacaagtttcagttaggatgaatgagttctaggaatctgttacacagtaatggtgactatagttaataatactgtatacttgaaaattgctgagagtagatcttaaatgttctcaccccccaaaagatgaggtgacagatatgctcattagcttgatttaattattttataatatatacataaaagatcatatttacactgtacaattttgtcactcatgccttaaagctggaggaaaataaataatcacatgttggtattggttcattagctgtgacaaagatactatacttacataagaggttaacaatagggaaaaccaggtgtcaggtttacaggaactctctgtataatctttgcaacttttctgtaaattcaaagtcatcccaaaattgaaagtttatttttaaaaaagactatggcaaggacaatagtctatagttcaagtttaattttcatcccgtagggagcctgaggtaaataaaatagtccttagtgttctggtcttattatggtgtaaagtggggcagttcttccttgctgttgtcttataaagccatgacagtttgtttgcagaatcagagaatgcagtatttctaaatgtcctcctgtggaatttcctactggcatgacttttttcccctttgcttctgcccagtagcagtcccttgagtggcatttgctgtcctagttaatcagagggtaggagaaatgaaaaactctcatcttcccactcccatgaagtttcaatgggcactggaaatgtaggtcaaattgcatcaccatagaaaggagcgaacaggaaggtatttatgaagtgctgccaatgtctctttagattcagagtcatgacgaactggtattgagcccgttaggtgtgagatacagggaatcagggggcatgtttgtgatgtagtgccagaatgttatatttcaaccagtgataaaagatctctgtctgaaacctagtggaaatgacttacactggctttgtttaatttgcatctcccagcttctggaattctttttgtctcttatttattattggcacattgcaaaaatttgtattaatttagccagagagatgtttgaagtgtagaaactattgccatgtatacattttaagaagtctattgtttcgtagtcacataagtctaataatatattttggaaattacgtataaacataagcacagtgacatcttgattagcacatagaaacctcaaaatattttttcatttttaaattatgtttaaagtatctgttagatggatctctgttttattatttattttattttattattttttctagacagggtctcactctgccacccaggctggagtatggtagcactatctcagctcactgcagcctcaacctcccaggctcaagtgatcctcccacctcagtctcccaagtagcagggactacaggcatgtgtcaccacacccagctaatttttgtatttttttgtagagacagagtttcaccatgttgcccaggcaggtctcaaacgatccacctgcctcagcttcccgaagtgctgggattacagatgtgtatcgctgtcctcagcctctgtcttctttttttttttttttaatggaaaaatcttacagattttaggatataaggaaactttaaatacgtgtttttattttttacatattgtgtgctacctactcctttgtaagatacccagatattgactgccagaatattctgttactgacagtgttatgaacagtaagcatcctgatagcaaaaccaagtctaaaacctctattttcactcccttcttctcccatcaagataatcagtagttgctttatgtacaaaatggaaagtcagatgataagagatttttacagaggcttggatattatttaataatatgaattgaatagattattctgtggaatatgtttataattcaacatggttttggctattttttaactttttattttgagataattataaatttataggaatttgcaaagatggtccagagaggtctcggttattcttcacccagtttctcccatttattatgtcttaactatagtgcagtattaaaaccaggacattgacattggcttaaagtacatatatggttctgtgtcatcttatcatgtgtattttcatgtaatcactaccacaatcaagatatagaactattctatcactaaaaagatcttggtcgggcgcagtggctcatgcctataatcccagcactttggaaggctgaggcaggtggatcttgaggtcaagagatcgagaccatcctggccaacatggtgaaaccctgtctctactaaaaatacaaaaatagctgggggtggtgtcaagtgcctataatcccagttactcgggaggctgaggcaggagaatcgcttgaacctgggaggcagaggttgcagtgagtcgagatcgtgccagtgcactccagcctggcgacagagcgagactccgtatcaaaaataaaaattaaaaaaaacagatctcccttgtgctacccctttatagccacattcattcctattatcctcacagtccctaactcctggcagctgctaatcggttctccaactctaaatttgtcattttgggaatgttacataaatatgatcttttaaaattggcttttttcacttagcattttaaaaagaattttatttttaaaagaatatgataaaatttttaaacgaatatttatttttttaaagttgttacccagagtttgattcactaattttaagaccatatatttctagcttgggtgttccatactctgtgttgctatatttgaacagcagctaaagtcgaatatgccgacgtaatagctgattatagcattaaccttattgcctgctgttaaggatgataccttgatgttaaagggaaaattaccctgggaaaagtccatcctatcaacaaagtagatattacaattgatgaagagcaggaataagaagtcccaatgtttataccaaataaagtaactgaccatatttgtactccatttcatcttgaaatcttcaaaggagagagactttttggaacatgatatttaaatgaacagcagttgaaatatttacattaattaactaatgcaaagcttatgtcacagaattgtggaatgtcaccatacgaaatcaagtgtctgcatcatgttaagcttctttgaatgtcttaagtaggaaatggagttctatggataggcaagggctagaaatagcctcagaaaaatcaaatcttcagatgctggtatactattttctgacaaaatacggagaatattctaggatctataggagggcatgttagtgtttggctgcaaataatgataccatggctctagggaatgccacatggtcaaacctatagcactgagcaaatagaaagtgaatcccaggataccattctgcagcacatggcagtgaataagcactggctcctcagcttctccagaattcatgttcctgaggttgtgtcaggacagatttttatgaatagggtaatcttgcaactagcaaatgatttttgtttggccctagctcctaacattttagatagtcttcctcccagttgggaaaatattcctggtaattaaaatcatcctctacttaccagcttaacatttttcccttgatcacatttgttttctttaagcagcatatgattgtacttaaagtagctattgggatagaggagaagggaaacaatcatttattgaccatcagctatatgccagccactttgctaagtgtttatgttcattcatgcatgtaactgcagtattgaaaaatttcattaatgatactcattaagttatggatctgaaataaacagcatcctaagcaactgtttgtagcaagccaattttcttggtcagatttactcaaggggtttgttgaccaaaacacagtagagaaagagtgagacatagtgcatatatgcctgtgagaaatggtttaaagaatataattatatctattaatttgtatattcatgagacagtgtgtaaaatgatacagaatttagacatgtaagacccagcccctctcctcttagctgtttatccaaatgagggaaacaagttttgagttaaaggaaaatatcaactaactacaggacttaaactgcttaacccatcaatgtaacatgtataacagggcattacataattatttttgaaatctttcagattgtaaatgctttaatattcagaagaggaaatgattactgatctctgacccttgattttgttatctgtatgattttgctacctcgtagaagtaaataaaataatgtatataaaagacttaatataatgcctactacttagtataccttcaataaattgtagcggttgctgttggtaatgaaaattatgacgatagtaagaatactttataagagtaggctaactgctataatgacccaaaaccccagtgccttaacacaatataatgtttatttcttgtttaagctcagagtgtgttggcaaggaggctcagagtgtgttgattcccccagtcattcaggagtgaaattgtgtggctctgccctcctgtaagtacttggagccctttccatttgaccaacagagggtaggagagactgaagctcaagccagagaggtttgtatgggcctagcccagaagtgtggcacccaacatttctttttttattttattttattttattttatttatttgtttattttgagacagagtcttgctctgtcacccaggctggagtgcagtggcaccatctcggctcactgcaacctccacctcccgggttcaagtgattcttgtgcctcagcctcctgagaagctgggactacaggcacgcagcaccacgcctggctaatttttgtattttgagtagagatggggtttcaccttgttggccaggctggtctggaactcctgatctcagtgatctgcccacttcagcctcccaaagtgctgggattacaggcgtgagcgacgagcgactgcacctggccccagcacttttttttttttaagagatggggtcttgctcttttgcactagctgaagtacagtggcacagtcatagctcactgcagccttgaactcctgggctcaagtgatcctcctgcctcagcctcccaagtagctgggactacaggtgtgagacaccacacctggctaattatttattttaattttcatagagatggagtctcgctgtgttgcctaggctgatctcgaactcctggcctcaagggatcctccctcctcagcctcccaaggtgctgggattacaggcgtgagccatcacacctggcttacacaacatttttgttcacattttggattcagtcacatgtctctaccttactgcaatgaatattgggaaatttaggcaaactatgtgctcaggcagagaatgtaaatataggtgactattggcgatctctatcacaaatagtatttacaaaggcttagtagaagtggaagcattttccctggatcttttagagaagagtgaaatttgttgtgtgctgctcagcctgtatttaggaggtaatatttaaagaggtgggtagaataattaaaaactgtacgagcattattaatgaaaactacatttatcccactagccactgcccttactgtcagtcatttggtaagtgacctttgggaagccatttatctgttacagacctgcatttcctcacttacaagtattctttgtagggctgtggtgaagattaaacaagacagtgcatgtacagagtttagcagagggtctgatccaagttaagcactcagcgaaaattgttcttattggtagtgttgataagtatggcctcagagtaaaacgcgtgctagctgttcatttatttaacatctatcctaagggaccatgctagactagcaaagaatgacttgactgaggacacatatatgaattttagaattttgtaaccccaggccagtcataggagattaacgttcccctggtagactattggggaacaaactctctctgttccccaggctttcctcctcccagtcaactttaaagacacctctaccacacacacacacacacacacacacacacacacacacccgccaactcctgtcaacaggagtactggactttaatttgcctcttatcgctccttcacacacacacacacacacacacacacccacacacacacacacacaccccaactcctgtcaaccggagtactggactttaatttgcctcttatccctccttctcccttccttagcattgatgtctataggtgagtttgcctggtgagagtgaaggtaaatgccagagcagctctttattccactggcctaattgcgggttcttagcaaggcaatagcatcccactccaggcacatattaacctgagtggctgggtagccgtcaggacctgtggttccattttatccaattcaattcatcaggcatttattaacacttaacaacattgggccctagggatacaagaatgaaatgttgcagacccagcctccaggaagcccacctagggcagtaggcatgatgacctgatgaggtttcatctgagctgggttttgaagtctagatgtgagttacttggaaagtaagaaaggagttcaaggaggcatgaacaacaggtgtggagaaacaggtgggaattgtggtgtattgcagtggagggaatggttttaagctcaactctaacatgcactacctcagcttttattggcctcatctcacaagcctcaattttctgataaaggagcacagaaagagttcctgtgttatagatgggaggtctaagtgaaatgatgcatgtaaaaggcttactttttattactgggcgcatggtaagtgttcagtaaatgtcagctactactactattattattgtcatgtgcttttataaattgactttcaaatctactgacttgatcagggttttgcacaatgacaaattggagaattactgggaattttatattttacttttagctaatggtgaaatggtgccctgtagtcacaaataatggatagaaaaatgccttgctgacctttctttgctaaaagaagagggaacctagttaacctcagtgaagcctgggagagataggctcaagatgggagaactgtgtgtcctgaaatggcaaaagagtgaaggatggctatattgaacatatttggagagagcagagggactgaacattgtgtaggtatatactaatagaagctgttagaaaatggaggctcctttaaaaataagactccacatgaggcgttctacgaagtgttgagaaagccctaggactgactgcagtggctgaaatgtactcaagaaacccaggccagagttactggagcccttcctcacaattggccttggctccctctccacttgtgtgttttcacattgacttgatcttcagtggagtaactctgagcagtggctgtagctcagcaggtagaaaaactctctaacccttgaagaggggaatacagtagcaccattgaaaaaagaggttgtgtatagagtttcattcttaaatttgctttgccaaggagaaagcctgtgagagtgaaagcaaggtggaactggggtccaaagagagggagtaaactagatgccatattaatttgtatttctggagaatatgactgcagtttatatataacttggtttaaacatttttgtaacctgcttaagaaatttgggtttgggtggtcgattttcatttggaagaaaagattaggaagacagtatagttttggggacacaagcatggctacctacaggagacaggtctgaaaggaaaataagtgatgcagccagctgagtactttggaaattacatgccaaatgacaaagggcagctcccaacacagcttcattcagttatccccctccaggaaagttggcccctgtggccagatttttagatttttcccagagaaaccaggagtttggaattttatatgaatcttccagccttttaaatattaacaacaaagtcatattgttttccccaagatcaccatggaaaacaaaaaagtgggctattttaggcctgtggacttttccatttgcagtgagtatcaagatggagagaaaaatgcacagcctaggagttaggtggctcagctgaataacactgccaattctagtgccagacacagtacttggcatggagcacattctcaatgtgttttgttttgtttttgagttagagtctcattcttttgccccaggctggagtacagttgcatgatcatggttcactgcagcctcagcttcccaggctcaagtgatcctcctgcctaagcctcctgaggaactgggactacaggcatgcaccaccatgcctggctagtttttaaaaattttctgtagagacggcgtctcacccttcctcaagcagtcttgaactcctggacttaagcagtcctcctgctttggcctcccaaagtgctaggattacaagcatgagccactgtgccccagcctcaacatatttttattgaataaataaaccagctgagataaatctctcttggttttcagtctttacatatctagaatggagagattggagtcagccttcaaggtttcaggttgttttttttgttgttgttttctctccctcctcctcctcccccaacaagctctgaatttataagatcacaactctttgtgctttccttgtaggactaatttctctggctccttttcttccctgttatgccctctccaagaacctagggtggcagtctcacgttaaagcttggcgattttgcctagaagttaagaatttaagtttatactgttaaaaacaagactgacttggtttagccttttttctttcgtttattgtgattagtaggtttgtgcttaattttgacacactggatgacataacgaggtgattcagattatgccttaaattgcaacaaagttctgaatcttaacagaacacagaaatgttactcctagaaaataagccattttccctgtaaaagccaatataacactgcccatgtagcattgtaggcttttctctgtttaaaaggaatgatggggtgtttctgaacccttcggccttctgcagtatattcttttataacacattctggtgatagctctacttttaaaatacgtttttttactatcttggacaagatcattttttgttgcagttatcacaaatcagttccaaaaaataagctcattaaaaggtgggggcgggggcacttaccctagatgccaggggattcttagaaccctagggaacctagggaaggaagtgctttgggccactcaggggctatggcagtaacaggaaagcccaagaacactcccaggcagagattctctctctctttctttctttcttccttcctttcttcctttctccttttctctctctctctctttctctcttttctgtctctctcttgtttctctgtctctctctctctctctgtgtctctctctctctttcttgttttttctcctgggggaaacgggagataagtggcctcttgggtcagattcactctgagcagcacattcattctttcattctctctttgctgactgtctttttcctatagactgagagagcacttagaggtagcttgcagcctccaccaaactagaccctcttcatctcaatttctcgttctaagaagaacacattgactgtctcagtttgtgtcgtgtgtccagctttgacaaagatgggagtaagtagtttgtagccccatagtacaagtatgacttggcatggagttgagaattacttagtgcttagaaaaaagggtcaacataggctagggagctcctgtaggataaagatatcttctataatctccctcccccttaaaaaaaaaagtaaataaatttatgcttcaagttaggtcttctttctttctctcccactgctaactggccatcatttaaatacatcttttttaaaattatatttattgaatgcttattacaaagtagttgttgcatgaataaaaggtatcaagtttaatgattctaagaaaattttccaagtctatttaaaatgatttctttttaactatttctctttgcaaaacaaaattaagttgccattgaggcagtttggtgtactggaaagggaactaaatatcaccaaaggcccggattctagttacagtttcacaccacttgttggctaggtaatcttgagcaaattatgaccttcctcaatctgtttcttcagtagtaaaatggagatcatagtaacagctcttttgaacacagggttattggaagatcaaatgagagaaaacatacaagcatgtaataggttttttcccatactaaagaaaggctcttgacccctattctaagtagagaagtttctgtttttaaatgtttatttttagtaactgcaactatcatttttctctaagaattggatttcctataaagcatttttacagtatgtgactagtaagtgatgaattcttttaaaaccaaaactatcctgaaggagatttcatagtattctgaatctgatgacttccttggatactttggagaaatagcagcagtgtccagatggaaaattgaaaaatggcttgacctagtgaaataagatcaagtgcagagtctaatctgatgctggtgttgttctgccttcaccttctgtctactctgaaggaatcaccatcagggtggtgaatgcttatcatgaacataacatctttattgactgtctctatcatgacaatttgtaattagctttgaatgatttttgcacagctataaagtatttaggattcaaagaaatgcattttggctcaggacagacatgttgaacaagaaaacagcttttattggaagtaaggcagaaaaggagcactaaaatggaaatcagagaaattttttaaaagaaaggagactgggaaggaattagaaatctgaagagaaacatctggtttataaagattgtgagaatgattttaagcattactgaatagcattttgagtgaataaaattgacacttttaaaaagggagagggaagcagtatgacctgggaataacttaaaacctaataaagataattatgagtaaatgttcaaaacatggcatataatttcagccactgattttcagagatgctttatttgtatcttaggatctcaggccataggaatatttggttaccatcttagagtacatgaaaataaataaaagttgagcaaagcactattacctcctccacatcttgctttatagccagtgagaattatagggagagaagtatatgagtagtgaatttttcatgtgagctcagcctgtcttgtgctttataccttgacaacatctgcccgatagctgtgtcattgcccatatttgtcgctttttctcttctgctgcatgtgagatttgaagaccagcttattttctaactttggtttgttaatctgtaatttattgactccttaactcattgctcctccacaaattaattaaaaagttaccacattttacctgaaatatatgcacacaactatgaagataatggagcacatagtttccttgtgctttttaataagatggtttaattgaattgttacctgttgaagtattaaaaattgcttttataaactgctgaaatgataaagaacgacagcttgagctctccagataataatctcattcaatctgtgtttttaaaatctgtgatttgacaagtttcataggagcaggctttctgaatcgccattttaaaaattaagtggaaactcattagtgcaaattatatacaatgattttaagccccaggaggctaactctgtgtacatattgaatagtcatttgttcttggtttattgtaactatagccaattaagttcattgtaaaaaaaaaaaaaaatcacatttgtagtaaaattggtaaaatgtcttgaaatttaacagtttgacatctcaaagcacatataattttggaatatctggcaaccaatgagattgtatgtttctgattagctttgtccatccactgtttcatccatttgccttttttctgtttttgcagatctgaacagaattaagacgaacgagctttcacaattgcagcagatgaagatccattggtaaattgatcaggatttttggcctaccctccaaagaaaaggtaactggctgttctgatatcgcaaacacagttgaataaatataatgcttccagttataatagagtttgagttttaccaaaggatgatagtttattttaaggcatctgtgtaagatctcaaatgttaaatgtaatcctgaatatgatcttagaaaaataaaatgacaatgagtttaggagtatgatattattaggtatttgtttctcaacacaaaaactactaaataacatcccctccaaatttgttaaaattgcaggaagactttagttatagaatcctccttctttcccagtctatacccacttttttctggaagttatccaaaagtgtgctcttgtttctttccagcaccattcccccagctcctgttttcttgtctttccatgtaatgtagacccagctgcttagggcagggaagatcatcagcaagactgtaaaacaggcaagcgttcttcaggaacactttctgggcccattgcctttgcccaggctgacagacagctctgtggtaatgagtagtctctgatcattacaaaaatagcagccatcattaatggagtgtctttttttttttctttttttgagacagagtctcactctgttacccaggctggagtgtagtggcatgatcgtggctcactgcaacctccacctcctaggttcaagtgatttttgtgcctcagcctcctgagtagttgggactacaggtgtgcaccactacacctggctaatttttgtattttagtagagatggagttttgctatgttggccagactggtctcgaacccctgacctcaagtgatccacccgccttgacctcccaaagtggtgggatttcaggcatgagccaccaacgcctggcacattaatgttgtttctcactgcatgtccaccattgtacatttactgttttgggaggatagtggtgaagtttcacataatatgaagcaggaaattcctggaggaattttgatttaaaaaaacaaaaagggctgagtacagtggctcacacctgtaatcccagtactttgggaggctgaggtggaaggattgcttgagctctggagtttgagaccagtctggccaacatagctacacccccaactctagaaattttttttttcttttttttgagaccttttcttgctctgtcgcccaggctggagtgcagtggcgccatctcggctcactgcaagctccgcctcctgggttcacgcaattctgccgcctcagcctcccgactagctgggactacaggcgcctgccgccacgcccggctaattttgtttttgtatttttagtagacacggggtttcgccgtgttagccaagatggtctcgatctcctgacttcgcgatctgccctcctcggcctcccaaagtgctgggattacacgcgtgagccactgcgcccggcctaaaaaaaatttaaaaaattagtcaagcacagtggtgcatgtgtatagtcccagctactcaggaggctgcagcaggaggatggtttgagctcaagagcttgaggcggcagttagccatgatgatgctgctgcacaccagccccagcggcagcaagaccccatgttaaaaaacaagcaacaacaacaacaacaaaattattctcctacttctgaaaggaatgagataacctttaagttaaggtgcagtttaagatgagtcattaaagactgaaacaacagaatcgaaacaaggaagacgaaaggagtttcagcctctggaatcaactatcttacatacttaggcaacaaatgtgatgccacaatcaggttttaggcaactgtagcaaaaatggtagcatttcagacaacacgtaaaagataatatttttaccattaccaatctgaaacaacttcacaaaaagtgttttagtactgttgagatgtttgaaagaacaagagtttggggagctatgaagtctccaccttaaaaacagcctcttaaaatgttctggactaaagctgaagggccataatgcagagatgtctttcagtgatcgttgaagtcatcacgttgaatgttgttcattgtatcatgtctgcaaggtgccagagaagagagaaacaggctttcctgtgtggtgtccaatcactgacaatggaggggtatggggagaagttaagaggaaacatgtttggcagaatgccagaggagctctttagtgcctgtttatggagtttctactgtgtgcatggggattgtccctgggaggaaaaggagaagaataggaggtgatttacatggactgcagtgatgacctaatgcttttttgaatattataccaatgaaaagattaatatgatgccaggaagtaagtgaccaagaagcagagaaagaagaggaggcacaagttcaaaagtctgtagaggccagagagaccagagaggggaataaagtgagccaggtggaactgtgagaaaccatccggtccatgatccatctaatgtggcaatcccttctcagcagcagattgtaggcccgatatctgttcattcaacaaacatttattgggtgccaacctatgtgctatgttctcttatggtcactggggataaattagtaaatcgaaaggacaaatatccctgccattgaattggcacttacctttttttcttaattaacaagtaaaaattggatatgtttatcatgtacaatgtattcttttaaaatatgtattcattgtggaatggcttaaattaactaatttaatagctaattaacgtaggcattacttctcatacttatgttttggttgtgagaacctttatctagtctctttgcaatttgcaagaatacaatacattgttattaactatagtaagcatgttttgcagctgagttcttgaactcattcttcctaactgaaattttgtaccttttgactaactttccctaaacccctcacctctatcctctggtaaccaccattctattctctacttctatgaattcaactttttaagattccacatataagtgagattgtgtgctgtttgtctttctgggcctggctgatttcacttaacataatatcctccaggttcatctatgttgctgcaaatgacaggagttctctttaaaaaaaaacaaaaatagagataggggtctcgctatgtgtcctaggctagtctggaactcctgaaccctggcctcaagtgtttctcccaccttggccttccctccagagtgcttggattacagttgtgagctaccatatctggctggattgccttctttttaaagattgaatagtattccattgtgtgtgtgtataacacagtggaatattatttagccataaaaaagaaggaagtattgataacatgttccaacatggataaaccttgaaaatgttttattaaatgaaggaaaccaaacacaaagaccacatattatgtggtttcatttaatattcagaataggcaaatccatagagacagaaagcagatgtggttttcgggggttggggagggaatgtgggcagtgattgcttgatgaatacagggtttccttttggagtgatgaaaatgttctggaactagatagtaatgttggttgtactacactgtgaatgtactaaatgtcatcaaattgcacacttaaaatggttaaaggccagttgcagtggctcatacctgtaaatccagcacttagggagggcgaagcagaaagactacttgagtccaggagtttgagaccagcctgggcaacatttgaaaccccgtctctataaaaaaagtacaaaaattagctagccgtggtggcatgcgcttgtagtctcagctacttgggagctgaggtgagaggatcactggagtcttggaggttgagggtgcagtgagccgtgattgcaccagctggattgcacttgagcctgggcaacagagcgagaccctgtctcaaagtaaataaataataaaatggtgaaaatggtgaatttcagttatgtgagttgtatttaaaaaataatggcatttagaaagactttcagaaatgtgtactttatgtcttggacatgagaaggtggtttagctagagtggagtctttgtaagggggagcggtggatgctaagggtgggaaaaggtttggctagatattgaaagatattgactggctaaggagtttagcagctataaatatagcaccatatactccatgaggaagaaggaaactcaagagaggttggtgctctgggaatcccagctaaagatgaagtttcaagcaaaggaagtgacttgtagttttatcagtccatgccgttgccactcacctaacagagttttgtgacaatctcacaaaagtttcaatattagtttagagtttcttcttcaaaaaaaaatctttataaaaggataatcatcttttaaaataatcatcctgaatataaaactatgttgataaaaaatctaaacattatataaatatatatgctaataaaaagttcctttaagtttaaagaattaaagcatctttaattctttaactccttgcttctcatatggtaaatctagagttatctagattgttttttgcatagacttatcatcatcatcatcatcatcatcatcaccactttttcacaaaaataggcacatgtgggccgggcacggtggctcacgcctgtaattccggcactttgggaggccgaggcgggaggatcacgaggtcaggagattgagactatcctggctaacatggtgaaaccccgtctctattaaaaatacaaaaaaattagccgagcttgggcctgtagtcccacctaccccggaggctgaggcaggagaatggcgtgaactcaggaggtggagcttgcagtgagccaagattgcgccactgcactccagcctgggcaacagagcaagactccgtctcaaaaaaaaaaaaaaaaaaaaaaaggcacatatgattcatagtattttttgcatgtttctttagaaaatgtttatcttggctgtcattgcacttctttcgtttggaccattacattatatgctattttatttgtaaaaacaaacaaaaagttgaaaagtaacggccacatacctctattagagaatgaattgttataaaatgtgaaagtagctaacacactgagcacttaatatgtgccaggcactattctgaacatattaatttattgactcttcataagctgatgaggtagatattattgttatcttccttttgcagaggagctaactgaggtacagatgaaaaaattatcctgccaacgtccagagttaggtggtggcagagatgggttccaggaccagcttcatctccaactcatgttcctatgaggaatgctgtggctggtggtgtcagattttacttaggattttttcaagataagtcaatctggaattttttgtgaaattttccaagttttaatgttggcttaaaaaatagctttattgagatgtaattcaaatgccataaatttacccctttaaactgtacatttaatggtttttagtgtattcacagtattgattgtataactgtttcttctatctaggtcaaaaacatttttagcacccacattggagaccccatcgcattcctaagcagtcactctccatcttctcttccttcagcctctggaaaccactaatctgctctctgtctgtatggatttgcctattctggctaattcacctaaatgaaatcaaataatatgtgacctatttgtcttctttcatttagcataatgtttttaagatttattcatgttggagcatgtatcagtgcttcattttatggctgaataatttttttttttttttttgagatggagtctcactctgttgcccaggctggagtgcagtggcacaatcttggctcaccacaagccccccccactcccccgccaggttcaagcgattctcctgcctcagcctcccaggcagctgggattataggcgtgcaccaccatgcccagctaatttttttgtgttttcaggagagatgggtttcactatcttggccaggctggtcttgaactcctgacctcgtgatttgcctggcttggcctcccaaagtgctgggattataggtgtgagccactgcacctggcaataatattctttgtagagatatatcacaatttgtttattcatttgttgatgtacatatgggttgtttccaccttttggcttttaggaattacactgctaatgaatattagtgctcaggtatctgagtctctgctttcagttcttttgagtgtatacctagaagtggaattgctggatcatatgctaattctgtgtttaaccttttaagtaactaccactgttttccacaatggctgcactgttttacattcctgccagcaatgtatgaggattccagttttttcatatccttgctaacactcttcattttctgttcttttgttgttgtttattacagccatcctagtgggtgagaggtggtatctctgatttagatttgcatttccctaatgactaatgatattgaccttctttttttgttgttgttgttaatttactgggctgcgttctttcttttctacattctagttcaagtcccttatcagataaatgatttgcaaaaatgtgtaggttctgtgggttttcattttcttgatggcatcctttgaagcacagaagtttaattttgatgaagttcaatttacccatttggctctgttttcattcttttttaatttaatttaatttaatttttttttgagacggagtcttattctgtcgccagactggagtgcagtggcacaatctgggctcactgcaacctctgactccctagttcaagagattctcctgcctcagccgcctgagtagctgggattacaggcacgtgccaccacgcccagctaattattgtatttacagtaaagacggggtttcaccatgttggccaggatggtctcgatctcctgacctcgtgatctgcctgcctcggcctcccaaagtgctgggattacaagtgtgagccaccgcacccggccttggctctgtttttaaaaagaaatacctggtaagtcagattccaacccactaattgcccgcttgtgattgctgctttgctgccactgccccagaaaccatttggaaaaatcctcatgctttttgaaaataccggttttctgaagagatggagcaagctctggaaggcaggaaaggcagatttctcaccaggagcaattttgttttggttccccttttctactcctgaagttccttcacttagaacaccttgatgtagacgtgggggcatagtaggaagtggacagaggatcaaggtctccaggtcttgaaaattttatgtttatcaaaagagaatattggttaaaataaaagattaaattggtgaaaataaatatttgtcttgagccatagatgatgtcatttaaaatcagaatggccataagagtgtggttagtaattgtgtgtttctaggaagaaaggtttatgaaccagtacacctagaagtcatctggggtaaggtcttaccctttatatttctttgaatgtgtacttgggaggagaggaggacaggtaactgtattcattcatagtcattcatacacattagtgaaaaatagttaaatctgcaggcctttacctctaccaagaaaaggagagctttactttggaggtggaaagggagtgcaagtttttgtggaacagtctgtcttttgagaagcagtacaaacccaggtaggctcctggatcacggtgcaaagacagaatgtgggaaagtcaagggtgtcatgtttgctggatctatagctttgcttagagctggaccttggctgaggaaaggaggaagaagcatttgtgttgttccttccctcttatactaacacacctgcattgttcgtcctaggtttcaccccaaaggcattttgctgaccaatttggagacatggttacaactcgtcttatggtttgtgggaaagtgggttccaggttctaaataacacccttatgttgggaatgcaaactgttgatctctgggagactaaatgtatgtctcattgtcaccttgatttcagagcatatactcttaactctgaatccatgaagtcctgtgatatagaggtggggatgagttcccatgtatgtgcttagtgagagggttcaggaaagagtttgttaaagaaatggaatttgtggaagaactttgattgaacagcaggatttctgccaagggagggaaactgttaaagatggagtgtcctatatgagcaaaggcttgggaactgggagttggatggggttggggtgggggcatgtttgaagttctgaatttgtcatttgggctagaccatagactacctgcaggaggcaactgaacagtgtagaagtggtggagctgaggcaagggcaaactgtagaggaccttgaatgctaggagagaagtttttatttattttatccgtcagtggggagcccctaaaaatgttagagcaatcactaacatggctaaagccataattcagcaagattggtctgatagtatagcgtacatagattagaattagggcttactatgtgacaagcatggtgctaatagtaatagctgacacagtgtgcttttttgcactgtaaatttcttaatgttcttcataaagtagttactcttgttttactcattttatagatgtagaaatatgcacagagaggctaagtgatttccccagagttacacagctcgtagtggtagaagtgggattcagcctgggcagataggccctagaacccacgctcttaatggctgagcccccaaaaatggtgatatttacagcattgtcagtacaaaggtacatgggaaattacgtttaacaatgtgtttaacctgcattttatggtagctgacgcagtacactagaactctatacagtcgacttccttttatagctgaatattggtccaacttttccattccttgtctttttttttttttttttttttgtaacagggtcttgttctgtcatccaggctggagtacagtggcacgatctcagttcactgcagcctcaatctcccaaacttaagcagtcctccccctcagcctcccgagtagctgggactatagacacatgcctgcatgcctggctgtattttttttttttttttcagtagagactatgcctcactgtgttgcccagactggtctccaacacctgagccttggtcccccaaagtgctgggattacaggcatcagaccatcacgcctggcctccattccttttctataacttgaaactttctatttgtaaaaaattcctcagccgaaagactttaaatcaacatttcaaatcaagttcgtcataaaattacaagccagttttaaatccctagaaacactgggcattactaattaccttttatattataatttattattaccttttatatgtgtattttcaaattttcttctcttttcaagcaatttgctattactggtgaatgtttctttgggagagttcatatgtacatgcaaacatatgattaagaaaacaatccaaaaatttaagggtttgagatgtttagcaaatgatgcattttactatagaatgagtatgtgtacaggttgagttttcaaaaagctatttatgtcttatcttttaagtcctcactcttgcaactttccttattattcctaattttgcacttgattgctatgaattccagccactaagctgatgaattcaatttactctttccactgttctccctctactggaatactgatattcatgacaagctgtaaggtacttcactagagggagcatagttaaggaaaggcatgccccttgtgcagaatacagccctggctctctctggagaagaacgaggaaaggggaaagatgtagtcagaggagtgagagaggatttgaacaaaggctcagccaattttaggaagataaaaagaaaccaaagccaacacattcctaatttagtggatctgagtttcttgttactcaaatgacttcagtcctttggggttgataatggagaatctctgttaccaaccctgtaatttacacagataagtatactgtagttaactgcttttcaagtttattaaaatgttgtactgggactggtggttttttccaattgaagacggttgtgtgggatcttgtatcttagaaatgttttgggtagttttagcctttttacattaaactggatttaatgtaggaaaggtcaactttttgttttgttttgtttttgtacattgtgatacctttggccttggaacaaaacattttatgagtgcaaagaatcctttttgtaaagagagacttgttagccttggcatctactgagaacatccctaaatttgggtgacgagataagaccacattttaaatatgtccttggaagggatgaaatgcacagaattagcagtacttcacctctgacagcccagttcttaagccatagacaatctagttggtggtgacagttttgatgaattgtttcccctacttactacttttctcacatactcagtgaaattactatcttgtgttcaccctggtgcctagtagagtgcctagtctgtagcaggcaatcaggaattgttggataaattgaatactcattattcaagccatataaaatgaattattacttaagttttcagacagtgaagttcctcagagttacaaggcatcatcagaaatgcactggcagaagcactgattgatattatacaggcataatactatattaaaataacatattaagtgaatgtaaattgtattggcctggtgtggtggctcatgcctataatcccaacacttttggaggccaaggcaggaggactgcttgggctcaggagtttgagaccagcctgggcaacatagtgagaccttgtcatctccacacacacatacacacaaaaaaaatttatacacagttatattctttttataatttggtggtatggaaaggggattatctaggtaagaggtcatcaagttctttactgtgggactgtaggtaatacagctaagtattgggtttctgttgtactcttgtttataaacagtatgctttgcataaggaatgcttttaaaagttgccaaaattcagatatcagatgcagtgtgtcagcttgctgttttgactttttttggtgactcattccaactttaaggaaacttctaacgactatggatatcagaacatttctaggagttaggacttttttatgggtgaagaaagagtgggtaaaatgcattggctgcagcaaaagagaactggttgaagaaataccaggaaatgcccgtcaatctcttgtctgcacatcctcttcagtttgatagtaagtttcctaagggattgagctgaattgctcagtttaatataagacacttatttatagtgcttatttatgagattcctcaataattgatagcttgctattagttttgagtattgaggtactcaataattggtaactgctatttgtaataatttcccttaataacgatcataatgccaagaggatacttaatatttttcattttaagcccgcttgtgttttattaaaccaatcaaaaactttgaagaaaaaaagaggtatcaagcaggaattgggaaagaagttgaagtactctaaattgctgcattgatccccattggctagaagtcatattagtgaatcttgaagtagtttcacatccaaaagaggaaagtcaagcaatgtcttgaggaagtaggaccatacttcatgtttgccattctccttatttttgttctcactctgtagtttcagggatctgaagagctgtactcaacaagcaagctccctttgttatctatatggcttggtggccgcaagcttttcttttcaatggtagcttcaaatgccgttaaaatccaaattttcgtttttcttaagtgtagaatttcacaattccaagtaataaattgtgtactttaggaaaacagaggttgggtgttttcatgtaattattcagattttgcagtgatttggaatgaatgaaaaattgaaaatctgcataggggtcatctaagctatgttaaaagttagaagggaactctattcctgtcaagggaattatatgttttactcctgtgcatttttctcattgatagtcttatggaggaagttaaagctgtagaaatgatttttaaaattaaatctttccaatcatttctactattttggttattttgataaggacaggaagtaaccatggtttcactttttggacttgtttgcacgcaatccaggaaaaaattttacagacttatttctaaatctttctaaaataaaaatgtgtgtgtgtgtgtgtatgtgtaagtatgtgtgtgtgtgtgcgcttttaaattttgaaccccaaaccctctctagcaatcccaccttatgtttgggttgcagtgacatttctttattaatttttatgcttatgtaaacttcctgtgtttctgcaagttggaccaacaaagaagttggctacctctgtcacatcagatgtttgaggtacaaaaaaaaaaagaattccacttcctccccatctagtcagagaaagcacttgtgagcaagcatctctgacacacattacaggagttgatactactgcagtgtgaaacatgcgtgaaacatgctgataagaatcactgtttttgtctcaggcttcaaattttcacatcaatttgagaaaatagtaatatcaacaattattgaaagtggtgtggtctgctactgtttcaagtatttttaatgctttaggtcattaagtagccttttattttgccatctgtagcctatcgctaagcaaatgttgtgtatgttggggaggggtgctaagttttgcgggccaatgcttaatttagtgaacaaaatttgaccgaaaacagtattttctaaacatgttttgtaggaattccttatattctcctaatccctagggtctcgtcctgcccaagaaaagacaaccataaagagggaaggactaacaactcaagttaaaaatgaatcagatttttacttttggggtgaatgaatcacttccagaaacttggggtggtgcctctaaaatatgtacacgggttaaagcttctctcggtttgtttcactctcctccattccctcgcacactgatctcatgttctctctttgctggacgaattcaagttccccaggcgcacagtgtgacttccaattgcgggtcgggggcacacatgtgggcggcgtggcgtgcacacggtacttcgtcctgacacctgggcagacacctgggaggcacttccccgctagcccaaggttccctgcacgcccggagtccgctctgcggcggcttcccattcatgcttttgacaactctgcggccgcccgcaagccgagggcaaagtgccccctgcaccagcctctcccgcgctgccctggggccggccggccggctcctccataggtggctgcatttccgacttcgccctggctccagtccgggggcttgacgtgcaaacttcgccggagcgagctgagagggagggaccggcaagtgggaggaggcggcgggaggcgtctccgcttaagggagccggccgggtgccgccgctcggacggacgcgcggacggaaggaaggagcggggcagccgggccgggcccggggatgcaagcggccgaagggtgggcagctggaggtcctggggtgcggctcgggcttccccgcgcgggctgccatggtggggcgcggggttggagccgggccgctccggcgctggcctccgcgccaggtcctctgagcagaagcaggcaggggacccagcgccgcggtggcgggccgcctgctgcccgtcccctccctcgggcggccgcgggagtcgaaagcgaaagctagcccgcgccgcggactttgagcccggggcggggggtggccttgaggaggcgggctcggggggctgggcggccatgggggcgctgtcagcgtgccccacccggtccgcgggccgcgcacgccgccggaactccctggcgcctccttaaaaaacggcccccgcgcgactctttcccccttttttttgttacattgtaggagcggaaagaatgtcggagcgggccgcggatgacgtcaggggggagccgcgccgcgcggcggcggcggcgggcggagcagcggccgcggccgcccggcagcagcagcagcagcagcagcagcagcagccgccgcctccgcagccccagcggcagcagcacccgccaccgccgccacggcgcacacggccggaggacggcgggcccggcgccgcctccacctcggccgccgcaatggcgacggtcggggagcgcaggcctctgcccagtcctgaagtgatgctgggacagtcgtggaatctgtgggttgaggcttccaaacttcctgggaaggacggtgagtgtccacgccctcctccccccttcaccccctcgcgaccccctcctctctcctcccctcccccctgcccccctcctgtgacccgccccctcgaggggcagagatgctatcgtttgctgggttgcggaacgcggaggtgcccacacctaccccgtgcgtgcgtgagtgtgcgtcacactcctggccactgacctgcctctcccctcctcctgtgtgtgtatatctcctagggacagaattggacgaaagtttcaaggagtttgggaaaaaccgcgaagtcatggggctctgtcgggaaggtgagtccagcccccctgatggagtttgtacaaacccctgggaagtttcattgacagttcactgggaccgggaacatcagcccaccataccgactccccgactccccgtgcctgcgaagatgctgcctgaggagggagggagggggcagagcgcttggaaagtttggtttgggggcctcctgtaatgagagcgtccggaatccttctgtgaccaggcaggagcagcattattggtgatgagcgctgggaaccggcgggaagtttaacctagatctctgcatttctgacctccttacggagaaacaggagtagaggaaggaattctcagctttgaaacctttccacgaatgcttaggggacattttctgttggcaatcgaaacgaattttgaacttaaagaagatgctttacctatgcagtcttatttctgtaggatttaaggtacaagttggggatgttagaaaaaggtcatcataacccggagtgcattttggtcagattttttgcgagctgccaatatcacgggggaaagaaagccagaattttatttggtcaaataagcctttactgcccgtggctggtgaaatcagggtctaattatttgttagttttaaactgtttggtaaaaagatacactagggaaatagggtatgcctccaaatgaaagtcaggccaggtatctggaaagtgtcagactttttcttgagattttctttttctttgaatagtaagcttttgttgtctaatacctgcactaggcctgggcataccgtggtcagaaaggacttctgaagtccagtgaacttcgggttcagtttcaagttattctttcagtgagttaggacaaggctttgagtgaggtttggccccggaatactgagtttatagtccccgaatgcaattttatttctcactcgtagccatttattttgcagaattgttgtctatggcccaaggataggtagaactttggcaactggaacatttttaagtccaaagtttgcccattgttactgtcttcacatttccttctcgcttttcacacctgctttttcttcacttaactctgtttcggtttttttgaattgggcgctttttggcctcttggcactcggaggaagagtaataccagtgacagcccgatgagagcttccaattggaacagattatagaacaaattagttgatttttaaaatgagaattgctatttgagggtaaaggaaagcaagggaaagcacaggacttgttgatgatgttgcaatatgaaaaatcagttgctagtccggttttagtgctgaattggcagcctgcctgggcttaaaaaattaaaatcactaggtggcaactctcacagtaagcagttagagtagaactttagaggacctgacctactcttgttcttagttttcattctctgggtgtggatacatatcctataaaacgtttctaaatctgtgtgaaaacaagattgtaattatcaataattctgctgtaaaggatgagttaagtgtattaatgtttcagtgggtaccttgagctggacagggacccaaccaaattaaggggactgtacctcatttttgctagatatattattttctgttgggatacttttatcagcatgtttttcatgaagaactaagacgttaaactacctacttgaggcacaaaagggacatggatcttgttagtgttttgttttgttttttgagacggagtctcactctgtggccatgctggagtgcagtggtgcgatcttggctcagtgcaacctccacctcctcagtgcaacctccacctcccaggttcaagcgattctcctgcctcagcctcccgagtagctgggactgcaggcggcgggccaccacacccagctaattttttgtgttttagtagagaggaggtttcaccacgttggccacgatggtctcaatctcctaacctcgtgacccacctgcctcggcctcccaaagtgctgggattacaggtgtgagccaccgcctggcccttgttagtgttttttaagggttcccctcctcccccttttaaagttgttctaaccatttagaggatgctgtagctaccaggccacttggaacgtacacctgtctgagttgagaccgaagttttaaattcagtcagttcttcatttgtttgtgactttgcggattatgtggggatattttaaaatccaagtttgaggatgttcagcactcactcagtggacctttatgttctcctaacagaccattgtaggctgcttcagaaatgaaaatacatttaatattatcaaaacttattagactattattcattcattgtctgcttaaaattatcagctaccaagaaaagatgttttgaagttgaatccatactgattcctcttgttaaattgaagaaatatgtagataaattgatcatgtgagtgaatcactggaagtcagaaatgaccctttatttatttttttttttttttgagacggtgtctgactgttacccaggctggagtgcagtggcaagttctcggctcactgcaacctctgcttcctgggttcaagcgattctctggactcatcctcccttgtagctgggattacaggcacgcaccaccacacctggctaatttttgtattttttatagagatggagtttcattcaccatgttagtcagtctggtctgaagctcctgacctcaggtgatccacccgcctcagcctccacgaagtgctgggattacaggcatgaaccaccacccccgccagaaactcctcatcttgaaatatctctaggaatatgcacttgacttgaattctccaatgtgcaattttggacctaggggttagaaagcctggatgtgagagaaagctgcttaaccttgcattagttatttcatctttctgaatatactttccctctttggaagataatactacctacttcccaaggttattgtaggagctgaaattaaattagataatatgtgaatgactcagtacacactaattccttttaactctttcaactgttgataacctgacttcttaattctatatttctaggtacagggttttaaaatctgtgacctttgaaaaggcttcaggggattgtagttcccctgaaattgtatgcaaaataatatgtcagttttctagggtaggtgttcacagcttcccttggattctcaaaaggatcatttacacgtccccacccctaaaattcaaaactgctaagctaacctctctgcctgttttttcttttcactttttcctcttgtaacacattactttgaccaactcctatcaggcaagactacccaagggttaatgctgtggcagaaggttggaactcttgatttagatggagggaaattatttgtggtttaggtagtaaacctacccaaggcaagaatacccaagggttaatgttgtggcagaaggttagaactcttgatttagatggagggaaattatttgtggtttaggtagtatatcattccctcttctgccatttggcacaagtaggcaaatgttaagacaaaatttggttatttttcagaggtcaacctagttttgtttgcattcttgtatttgtattgccttattcttgttctgtaatttgcaatattagttgttagcatgattaattttggtgggaagaaattggtaatacattttgactttttgttgttgttgttgttattgttgttgagatggagtctcgctgtgtcgcccaggctggagtgcaatggtacaggcacgatctgtgctcactgcaacttccgcttcctgggttcaagcgattctcctacctcagcctcccaagtagctgggattacaggcacctgccaccacgcctggctactttttgtatttttagtagagacggggtttcaccatgttggccagcctggtctcgaactcctgaccagaagtgatccacccacctcggcctcccaaagtgttgggatgacaggtatgagccactgcacctggttgacgtttttgaaatgattaaacgtcaaccctggttgatgtttttgaaatgattaaacgtttttgaaatgattaagacaaattactgctttttcccccaaggtgatttgtgaaattccggacttccacagattttggatttgtgaaagttaacaaaattatgtttagattgaattaattggtactaataactgattagggtttctatattagtgcctgaatatttagagacccttaaaaaataaaaactttaaatgccttagttgcacagcagattttaaaacctatattgtgtcattgtaggagtcaacaatggtattgggaaaaatgacatcttctttgggaagctgtccataacttctctaagtctaaccgttgtgtggtatcaaagtactctgtactttttctttctgcattctacgtgtcagcatttgaaactctgcattatgtgatggctccttgttaagagagtaagttccctgagggcaggagtgttgttgatgaaggcatattcagctcctgcacaccattgtgctcagtaaatatttgccccaaaagtggatgagtagagctactaggaagattgaattgagtcactctagtgtgtgattcaaatgaccaatttttcattgtattgtgactccaaaagaagacagtattctgtgtgtttgtgtgtttagggggtgttgctgtatggccccaggggaggccagaaggtttcagcacttttcgttgctctgtccttaatatagtgctccatttacactttccagaaagggtacagacaggacatcacctctcttatctttgatatttaggcaaagaagtagaatagcaacccagtgtgatgtccacacttgatgacaggttatttccttctcataattaacctgaacgtgattgagcctggggcaagatggaaaagtgtgtggttagcacctgtaggcaactagagttcaaaacaaacaaacaaacaaacaaacaaaacaggcttgctaggagttggatagcctcagtaaacacagactgagtcaacagagtaccaccttttttctttcctaggggaaaaaaatggttcatggttaattaatggaaaacaggtgtttgtgaagtattttactgttaaaggtactacattgtgggtataatatcctctcccttaaatagcatttctgtttttctctagggtttcttttgtcttcttttctcctcaactgtttcttatgaacaatttgaaacatacaaagtagagaaaatattttaatgatcctccttgtatccatcacacagtttcagcaaataatgagtcatggcccagtcttgcttcacaaactctgccctactccccacagtgaattattttgaagcatatcatttcttttggtttttattttctgctcacatggacttcaacttatttcctgcaaaatggaggctttttgtgttctgcacctttcttttgaggcaagtcaggctaccatccctgatcctctctgtgggtgtgtaaaggttctgcagatggcagtacttgcagtctgcttatatcttatgtgcagatataaaccaagcctcagacaggaatcggtaaaatccaagttccctgcctcagcatcacctcgtgcttgttgaacattaatgcacatgtaaggagcagtcaggtgatttggttacagatcgcccacacttaagaaacacctccatagatgagaatcagcgtggccgtgacagtgggcattgtccttgctgacagctcctgtgcgtgtctccttccttgtaagctcttcactaacgcgtaggtgcaggaacccccagagacccagaaagaccctcctgtagcagggacttttccccagttgcagcgtgtgggccaaatcttgcctgcatggtttttgcattgcattggttggaataaaaactcaaaagatttcatgacatgtgaaaattatatgagacttcagtgtcagtgtccataactaaattttattgaaacgtagtgacgggcattcatttacttgtctgtggctgcttgctgcatacagtgaacagcagagttgactacacacaacagagaccatatgacccaccaatcccaaaacacttactattggttctttacaggaaaagtttgctgaccactgttctgatgaattccttggttgataaaaggaaacccaatctgcagaatcgcagaatacagtcttattattcttgaactgtctattttgaaggggagaatcttcaaaataataaaatccgttagtcttaaaccaagagttcattcaatattaaagaaacatgttgagttagaaggaaataatggagagtagaaatggtttcacataagaaggttgctgtctttgtccacttttatcattcactatctttttttttaattattatactttaagttttagggtacatgtgcacaatgtgcaggtttgttacatatgtatacatgcgccatgttggtgtgctgcacccattaactcgtcatttagcattaggtatatctcctaatgctatccctcccccctccccccaccccacaacagtcccaggtgtgtgacttttttatggcatacacctggttgggagcagttcacatacagagcacgaatagcgctgttattgccccagcttccaagagccatggaccatgagaatggtgcttgtgttctgttaagcccctcatggtatgtaaatatgcaagagaaagagtccagaactttcatggaatttccattcaaattctccagaatcgctgcccctgagctggtttagagaagctgaagccttgttacaggtcttaggagttataggaagaattcacggggaaacaaatctgcattttgattggagaagaaggcagacgttgttctttaggccccatatctttataattttgtgcttactggaaagtaacacctggcacaatccatgctgaatttctgaaccctcatgtttcgcaattcatggagaccatgcacatgtttccatgtgcacagtaggatggggttcccaagctgtgtccaatttacagttttgattggttcttgtaaactctaatctcaggagggaagtatgaggtatttataaatcacagtcctgtgatctaggtatcaccattatctccattttacagatgaggaaactacgactcagaaaagtgaggtagcccgctaagatcacaaagcatgtaagaggccctgtaacccagatctgtctaattactccacagctcacatgcttaaccattctgctgttccgagccctttccagaatgtacatggcttttcatgagcttgagcaggtcaccctaacctttgtttttcttatccttgtctagaaatactgacctttaccaaaagccattttttttaagtaaaaatatcagagccttttcttgctgtgccttacaacagtcggtgtgttgtatttagttgttcttttataacattttttctttgagggggaggggaagtatctacagtttgcattagaagtaatgggctttttaaaaaaagattaaatgaaagctaaggttgcagcagatagcaaacacaatcatctgggatttgtgccattaaaaaaaattcctttagaaagggagaagtgaaatttcactatttaaatagcatttcagtgcaagattgcttttaatcacattgttgttgaaagtttttattgcagtatttctaataaatgtgcccctctgattattaaagtattttttgattgaagttctaagaaaaagaagcctgttagtagacttagcagttggagttactgtacttttgagaaaaaggcagagggttacatttatattcatcttgtacagcagggattataataaatgagcagaagaaggagaacgatttttgcatttcacccactcataacgtaaaactagattaagtattcttgttcttctttgtaataaagaccctgctagcatgaaatgtttttttctcttatatgtaagcatatggcaaggaaaaagcactagttcattatcaattagattcacaatcttaaaacagaaactatttccctcccaggttatacagatgttttccataatcctgaactccagtcatgcaacagaaaaaaaggtaatgcttttaaccagtggtccccaggctttatatttcaaacaagaaagtttcagaaataatttggggactccagacatacggttgttggcaatttatatgtacttcccctcaaaaaagtatgagaacattgttttggaataaaggacagtcctttaattgtgaaaaagcactgtggtcttcgcagagaagagtatctattttggtgtttgagtaccatagctttaaatcattatttccaaaagcgtgttccagggaaccctgtttctgtgtgctcttggttggtgttatgcagaaaagaggttccatatggcaagtttgcagaagttagctttacacagagacagttctgggaaccccagttctagaattaagcctgggctcaaatctaagatctagtaggtgagcaatttgaaggaaaccgcatagctttactgagcctcacttgactcaggtataaaatgagaataatgctagtaactaataggggttgggagaattaaatgatataatgcaggttatcagtaatgaaagcacagtgtcacaagcacgcctttaatcaagtcatcagccaggactgtcagaggagcagcagaaagtgaaatgccagttttgctttagcacacaaggtgtaggcagtgagaggaaactctggcatgacagagtgtagcaaatgaaccgcagtttttttctttttctttttttttcttttttattcttttgaaacagggtcttgctgtattgcccaggctatagtgcagtggcatgatccatggctcactgcaggcttgacttcacttcctggtctcaagcaatcctcccatctcagcctcctgagtagctggggccacaggtgcacactaccatgcccggctaatttttgtattttgtttgtagagacggggtttcaccatgttgcccaggctggtctcaaactctggagctcaagaaatcctcccacctcagcctcccggagtgttggaattataggcatgagcaatcatgcccaaacctcagtttcatgccttcttggactctagtaaaaatgggaagtgggaggtgacatttcttagttcctcctttagccacctctttgacttgcagagagaagcatgatgtgggtatttactttttcctgcttatgcagagttgtacttgctcatcttctggaagcctgtagtttgtgcttctttatgctgctgcttgtaatgtttttcaaacccccttttttctgggcaaaaaaggtaaattataggcaatgtaataaagtcatcatgaaggtggggagtggatcagaaagataaatgaggatcctacttacatgatttttttaatgtgtggtgatagtcatgggggttttctgcctgtagagggaatttagaaaattgccttttcagttcttggaaatttccaatttaacttagcagttcttcacttaaattaccttgttctttttggaaactatataggaagattggttttaatggaaaaaattattacagaagttaatacatgctcactgtaaagattttactaataatagaagtatggaacacagaagccatcattctgtgtaatcccactctgggccaattttgtattttcagttacaggatttggacttagggcaaatcacactcgatcaaggacacctatgtaactactttgggcagttactggtaagcaaaactgaaacttgccaacctggtcatttcactttctgaccagtttcagaccgtgtcctttagtaggcctcagtgtattttgtttattttgtgattactgccttgagaatcctctgactgttttgccttaacttcactcatttagcttttatcccatgttctctgggcctcatgctaggctagataaagtctgaggatacaactccacagaaggtgagaaagcacagtcctaactcccaagtcaggcagttggtcagcagatacttaagtgccaggttttctgatgggtgttagggatagagtgacacaaatcagatggagccccagccctctagggaagtgagatacagtaaatacacaaatatttccaaggactgttgaatgctgtgaagtcaaaagtagggtaatgagttggggttagggggattctaactaacatgatcaaggaagacttttctaagcatttaacatttgagctgagaccagaatgccgagaaagaagtagccacaggctgggcgtggtggctcacacttgtaatcctagcactttgggagactgaggcgggaggatcacttgagtttaggagtttgagaccagcttggcaacatagtgagaccccatctctacaaaaaaaattagctggtcatggtgacctgtaatcccagctactcaggaggctgaggtgggaggatcacttgtgcccaggaggtcgaggctgcagtgagctgtgattgcgcatactggactccagcctgggcaacagagcaagaccctgtcacaaaaagtaaaaaagaaagaagcagccatcagatcatctggaaggggcactctgagaagggaagggggaggaatgtagggaaataatgctgacaaggttagactgtagaggccaaggaaaggaatttggatttaagtgtaatgaaagttggggggatagttggtggttaggggtagcttcagcaagggaatgatctaattcatgttaagatcactggctaatatgtggagggactggctgaccaggttagaggtaatagtggcttggactttgctaatggcagtggtaatgcagagaggttatcctgttcaggatacgtttggaggtggagtttacatgatttgatgaaaaattggatgtggatgagggagaaatataagaattgggatttggggcttgagcaactgaatggtaccacttaatgaactgaggaatgctggcgaatgtgggagacttagggtcagcagctctgattttggccacactgcttttgacgtacttagtgggcattcatgtgcggctgtggtgtcagcagttgaatacacaatctggagcatggtggagcagtctggggtggagactgggtcagtctgtatcctcaacatacagaggacatggaaagtcgtgggacctaggtttgtttcctaatataggagtgtcaataaagaatccattagggccaagggctgagccttgggtccctccacagtgaggtggtgggtgggcgaggaggactcttcagtgaggcagtaaggaaaccagatgagtgtgatggtggtgaatctgggaagagagaagaacatgctttaagtgaggagtgatggtctctgttatatgctgctgtgaagtaaagtcaggccagagaatcgatctctggctttgacagtatgaaggtcattaatgaccttaatctggagagttggggaggcagaaccctcattgtatggggaagtgatagcctgagctgaagaagtggagagggcaagtatggacagctttttaaagggtttcactttgaaaggggattggagaaatgaggcagtagcaggatgaagacatggggtaaaggatctaagggaatgatgaggaggtttgttttattttatttggatagtattagggaatgtttgtctgccactgggaatgatccaagagtaagggataattggtcacatgtgaaaagaattgataatcacaagtatagtaccttgagttggaaaaaggagatgcaactcagagtccacatggacaggctggttttggatggaatcagagactttatcacattctcatgagaggaaaagcatatggattcagttgcaggtagggatgtagaattgtggaataagatggttagttcattctcgtcatttctgtgaaggaagagggaagttgggagatcatctgttcacagtaagaggaagagttttgtcttcctttttaagtatccagtcaaggatacagggatacagccaagtaacaacagacatttatgcatcctttgtagtagggatccccaacttctcggctgtggatcagtacccgcctatggcctgttaggaaacaggccacacagcaggaggtaagtgggggtgggggactgagcattactgcctgagctccacgtcctgtcagatcaatggcattagattctcataggagcacaaactctgttgtgaactgtccatgcctgggatctaggttgcgtgctcattatgagaatctaatgcctgatgatctgaggttcccctgacccccccaaccctggtcagtggaaaaattgtcttccacgaaactggtctctggtgtcataaagattggggactgctgcttcagaggcttcccagcacccttagaagaaaatgtaaactccctagcaaggcctggatagtgggagtgtgtgcccagaaaatcagaaatctcagcaacttgaggtggaatcctgtcagagcactggggtgaagaagtagagatcaggaaaggaaggcttcctggaagaggcgaatggggagagttggagagttagccagtctggtgtggaagcagcttgtgaggctggggcatcagtgtgtgggagcctggaacttgttgcagccttggcaggtaggtagtggaggacaggagatgggagtagatatgtttgaaagatcactatggtagcattgtagaaatgaattggtggtagctaaagttaagggccagttgggcatgtagccacctccctaatgtgaaatccccaagtttctaggtaatgataaatggaggaagtggaattttaaaatgtacttatacaatcaaatgaatcaaaatgaattgtttctccccggtaaaaccctttaatggtttctatttgcttgcctttgttcgttcatacaacacatatttattgagcatctactttgtgctaggtattttcaggaaaacaacagcaaagaactgccctctaaaggtttattttagtggaggagacaggcaacaacaacgagttaaagaaaagtatatggcaggtggtaaggggtgttttggaaaaagatgaagtatgggaaatacaattttaaatggggtgagaagggattttctgagtcgtgacttgtaggatgtgagagcttcagtcgtgcatattgtggataagctttcacacagaaggaacagcaaatctgaagtctctggttggagaagacctggtgttttgaagaacagcagggggcggagtggctggagaggccagtgtggagagaatgctgtggaaaaaggtcaggtgctgaagggttatgagtgagttgggcaggcagatcacacagggccttgtagcccactgaaaatccaaatcctttactgttgcctacaggctccacttgggctttttcccactcctcagttcttgcatatgctcttcccactgacgggctactgcttctcctgctgccccacacctcttccctgatggtttcttctaaacctgctagacttaggttaagtgtcaccgttttttttaatttgtcctaatgctctccctccccttgccccccaatgcccaacaggctccagtgtgtcatgttcccctccctgtgtccatgtgttctcattgttcaactcctacttatgggtgagaacatgcggtgtttggttttctgttcctgtgttagttggctaagactgatggcttccaccttcatccatgtccctgcaaaggacgtgaactcattctttttatggctgcatagtattccatggtgtgtatgtgccgcattttctttatgcagtctatcattcatgggcatttgggttggttccaagtgttgctattgtaaatagtgttacagtaaacatacgtgtacgtgtgcctttatagtagaatgatttataatactttgggtatatacctagtaatgggactgctgggtcaaatgtatttctggtaggagtcacctttttgaattttccacatcactctctatattgctttatagccattatcaaaagatatccattgctgtctggtgtcaacataaaccaagccatcactcttgctgaaaggtgctgttattgttagatttggggtataaatgccaggtagaaggaattatcatgagaagtgtttacataggtcttggctaatttgcacaattggcccggagggggaaaacagtatagaccacccactaataataattcttgttgaaggagggagataacattcacggcataacactcccctgttggtgatagagtgtggttcgtctttggttccagtgtcctggtattcttttttgattgagtaacaataagccgtgaagagagaaatggttttggaatagctggtatatacaaataaatgacggtgtgcttgaatccctctgttacatcaccagggttttctttcccaagataaactctgtgcttttttccagcctctgaataggatatttattttctcccttccctttatttctgtttctaggcctttttctttccactctgatgaactactgtactggagacagactcggtgtctgctgtagattttaaatgctacactttctgttcctcttatcttagccccatgtctggtgagcttttcattgttaactggcagctgcgatggctatttcttcaaaagatgttgttgtttggtagatgttttcttaaaagctggtggctgttgctgaaaataatctgtgttgtgtgagtttataatctattcatgaatcatattctcattgtggttgtagttacgctagggtaacaaatacaacaattaatttttttattcatcagtgctgggtagtctttgtagaaatttcacaaagatcctctttttttcttcactagtaattctgaagtaaaaatagctactgaaggctgagcgcagtggctcacgcctgtaatcctagcattttgggaggctgatctgggagaatcacttgagcccaggaggttgaggctgcattgagctgtcttcatgccactgcattccagcctgggtgacagagcgagaccctttctcaaaaacaaacaaaaaaacagctacttatatataggatttagatagatggcaatcaagaattatgaacatgtgacaaatccttatagctatgtggttgcatacccatttttttttttgagtgccaaggtatttttgaaaagtaattgataacttaaaaaattaagcatcttagacaatacctggtagaaagtagtggtagtaataatagtagctctcattctttgagcacttactgtgtgtgtcacgcactgagtaaagagctttacatggactgcctcaatccttacagcagtagtctgaaacaggtatttatattatccccgttttaaagaggaaactgaggctcaggaaagttacactgtcccaaatctcactgcttatgagtggcaaagctgcgattcctggtctggctcaccccatggccagatggttccctgatttatcaattcagcagtggcttatttctgcatgttgagctgacatttgtggggacaacaggaataggcttttatttattggtaaatgagtaaagcatcaggcgcactccagagagcagtttaaaatcagggaatttgcttggttaatgttttagataatagcagcagtagtgaagttctggtggagagggggaaatggattatgtcaggaccttgggcctaaaacctttgcgaggcttgagtgtgcatattagtccacataagggttcatctaaactctgtagggtatatagtttgtagaatgcatggtggagaaatggttaactctgagaaagcaaatcctaatggttagttgagacaggtgaaaacaattcagaaattaaacataaaagggaaatggcgtatttattacccacttaggacaatgtctacatctgagaagataaacacaactattacaacattttagaataatgcatggaaatcattgtaatccaaagattatctaggaagctttctctctctctctctcttttttttttttttttttgtttgagatggagtctcgctctgttgccaggctggagtgcagtggcgccatctcggctcactgcaacctccgactccctgtttcaagctattctcctgtctcagcctcccaggtagctgggattacaggcatgcgccaccatgcccagctaatttttgtatttttagtagagaccgggtttcaccatgttggccacgatggtctcgatctcctgacctcgtgatgcgcctgcctctgcttcccaaagtgctgggattacaggcgtgagccactgcgcccggcctgcctttcttttgagaattagaattgttaatttttactcgtacccattaagcaaggctctggttgatattaagtaactaagtagattgatctgacctctcattcttttttccccatctctgcttgcccgggtggtaatgctacccagaaaggaaataagttcaaacaacaacaaaggacagaacttttcatcagatattttctttagacttggtcatgttacattactgtggccttacctgtgtgtgtcagggcgggcacaaggccgatgggagtttgctcaaagaccaggccagcttgctctctctgaccgcagagcctgtcccagaaccctgtccttggctcatcacacagtggttcacactgtatattgccagtgagctgactgacaagtagtggagagatgactgagaggctccccgatccatccacaggaactgggaattacctgcccagtagtctttggcaggaatctagggttttgaaatggttatgactaaataggacataatttttttaacatgaaaaatgggtcttaatatatattttaatggttctgaaatagtgccgaggactttgagaggtcaggctttaatgcttgatttggtaaaatttaccagcccctgttcagagacagattttccttgcattttaaaagataagtttttatttttattcccaaatccccaggaaattttaagtgctgtcagttttgtgaaaaggtaactagagagtgagtagggaatataccttgcaagctattggtttggcctcattactcaaattcttatttgcctgatgaagatatcctgtaataggatccctttgtgtgtagcccctccacagctttccctggaaggccttggccatgattctgtctatatctgggcactgtcaaatgaagagagaagtccagagtggaagaatagccacttgatctttttcaaatcccagagtttacaattttttttttttttttgaagatggagtctcgctctgttgcccaggctggagtgcagtggcgcaatcttggctcactgcaagctccgcctcccgggttcaccccattctgccttagccccctgagtagctgggactacaggcgcccacgaccacgcccggctaattttttttgtatttttattagagacggggtttctccgtgttagccaggatggtctcaatctcctgacctcatgatccgcccgccttggcctctcaaagtgctgggattacaggcatgagccaccgcacccggcaagtttacaaaatttttaatggattcgaatgtatctgtactgcttaagaatttttgcaccaagttttaggacactagacaggtggctacttctgtgaagatacaataagaacttgcgcattgattttgttaaatatggctgttgattgccgtatgtggcttgggagagtagaatgatgctgtttcaaagaactgctaagaaaaggtgagacacaaggatctagaagaggtggacccttaacgctggagttaatggtatatacagtagaagttttgtttgtttgtttgtttgtttgagagaaggtctcactgtgttgcccaggctgatcttgaactcctgggctcaagcattcctcctgcctcggtgtcccaaagtgctgggattataggcgtgagccaccacatccagcctacagcagaagtttgctgatttattgtttctagtgctgatcttcttgctgttactaacttgtaaacacccgcccccccaaaaaaaagtagaggagaaagcatgaagcttaattaccccaagttgtattataactctgataaaggttttgtaggcaatagctgtgaatacccatgtgtggaatctatgcttatagtgtgtctggccttgactaggttgtcaggggctcagggagagcccctggaggccatagaggacacttcgggactttctcttgctacagagagcaaactgaaggcccctggctaatgaggccgctacaggtctgatccagtgttctcttttccttatggcctttttgtcttctcttcagagaaaaggaacattattgccatctatttttttattttttcaaatacccttgactgtatttattctgtattaggtgatctcctttgtctccacccataccctctttaaattgccccactgcccctgaaacttttactttaggaaaagagtttacattaaatgctgctctcttttagtgtctcccttgtcatttaggtgacatgggtggcagatgtaagttttaacgataataaaactgtgtcaaaggaaagagaagcctgaagtttggaagtagacacaggaaggacgagggtgtgggctttgaaatcagggattctcaaactggggttatttgagcaatgggaggtccttgcatcacttcatgtatatgtgcaaaatattggccatatttacctgagtacagttttgtagggagagaaaatataccttccaacagattttcaaaagccctcatgactcaatagtgtttagcaccaccaatgaatatccaaagtgtttttttataagatcatcacaaatttccattattattttacttgtacttaaagcaggtgtttgtgcaggttcccatattcaaggtaattaaaaaattttttaatttggtttctaaatgttttgttttgcttagtgcattcactgctgtgttttctgcaatattaattacagaaacatacagtattttggctgcattaaaagttaagagtcagaagtaggccaggctgagaagatgaacctttttttgtcatagtaataccacataggcatgcatcatttcagatagacaaaaaaatttcagtcctacctgaggttttggaactgaagttatttgtaaattaagggcaaatgggagacagactttaggacttgaggtggcagccagggtgatctttctaatactctcatataatagggtcttgtttttaaatgacttcattgattgccattgcccttagggtaaaggtaaaactacttaatgtggctggtggacagtgttgtatttgcctaaggccaccacagcctctaaactccttggctttttcacaggttatgtgctgtccctgtgtaggtacactttcctttttcccagacaatttccctctgctcctttcccgtgacccctttccccaagaaagagaaaattacttctcatctcttagatcggggcttaggcagtagttcttccaggcagcttccccaggcctctggtccagttttatgtctgctccttgctttttgtgttcagccatagggagattgttacatgtcatcacagatagatctgtctaattttattcaactaccacctagtttttggtattatgggtgtgctattcttgtttaaacttgacctttatggatggacatacagactcttggcagtgttgctgcttttaccgacagtcctacagttatttttacaagtttatttgcagtagtgatgcttttgtttgcttgttttgtaagtaaactcagacaacttaagagtgtatctaaagaggtaatgtcaaagtgccctccaaaaaggctctactagtttcaggtgtcagaggtctatctagatgacagagaagtatgttttatggctagggacatgtttcctttctctctgagtctctccctaaggaactggcaggctctacctttttttcctgtgtctccctttcttcaagttttgggctgttgaaattatagttttctgtcctgtagaaacttagagccctgtgattttaaaatgcagtctgaccttcaaagtagtcaatgttgttgttaaaggaagaattaattgtaggcttcctggttataataatgttcttcatccagcatctgaaagtacctaggacattagcttttttaatccacacaaaatctgaggtacagtttttgccaccttgttgttgactttcttcatgtactctgcaagccctggcctccacagtctcaaaagcaaaaactgtttttgcctccctcaagaaagtctgtgatgagtgaactatatatcttgtaacaagattttggggttgaacaggaaacaaaatgttaagtgactatagtttcagctacttttcttttgcaaaaaagggaagtaaaatttccctgtgactgtggtaatgtcccttgtatccctctcaattaagtggtattctctactgggtattgaaataaacctgtgcaaagtagtttgttatataacatttaatgggcaataaaggggtgcgcagtggttcctgctgaatgggtagtcaagttgatgcttcataactgtcgttacctattggagggagtggctagttgattttctcttttctgttgtttttttttttcctaaattagccagtatggttatttattttaagatatgaccctgggttttccaaaacagtggtgattggaaattgcgtagttggttgaatcacaaatgttgtacttaaaaagctacttatgttcatcattgtttttagaatcatcaattggcctaactcctttgcagctaattgctgacactgtattcgtattgagaagccaaagactaattcctccaggagctggggaagtctgaaaccacccccttgtgtcctgtcctttcatacttcttgcctgctggcagcctcttccacctcccacagcctactcattcctgcctactcggaggctatgatagagtctggcctctttggcgcacagtgtcctgatgatttgccgcttctgggaagaagattcacagagggaaagaactgctggttttctgggttcttgggggcaggggatgtttttgtttatgcttatgggaaccactctgagccatgggtggagaaatcatacagtcatcctacttctttccagagatcaaaattgaataggggtggggcactaggaaagagatgttcttggtgagaggcagaaagagaatatttctagatgggaactgaaggaatagagagtgaattgaggagtattatgttgtggtgactcagtttttaaagtacttcctctctgagttcctgtaatcaccaagaattttgtaggaacttaatgtttgttgcacagcagcatcagatttctgggttagagtccctaccgcacttaccacagaccttgggcaagttatttaacacctttttgtttcagtttcctcaaagtgggcatggatttgaattgtgtctcccccatagggctcttacgagaatgctttaattaatgtagagtttctcagtctcaacactgttgacatttgggctcagataattctttattgtgagagaatgttctatgcattgtaggattacagtagttaatcttgctgtgtgttagcagcctctctggcctctaccactggattctagttgtgacaaccaaaaatgtctgcaaacgttgccagtgtttcctgggggcaaaattgtctgtgcttgaaaaccacaactttaatatatagaaagccctgagcacagtgcctggtatgtagaaatgttcttcagtgtttactgcatagtaggtagcttagtaaaggtaatgaatgaatgaatgaatgaatgaatgttgatgctgctgctcttccactattgaaagagtgctagttcctttctcaacagtcacattatggaggagatcacttacggcgattcctgtggccctgcagtaactaaattatttggagtggctaccaaggggagcactgtctccctatcttgagtttcactggtattgcacagtggcacctatgaagttccagagtagcccttgctctgtatagtcttatttccaagatgcctacttttctcttgttttagtatttctgaaatcagaatggattataacatttaagggtacattaaaaaaaaattattcccccaaagctattcacacacactcgatggcagctttgacattaaggaatgtggtatttctgtgaatatctgggctttgcaactgaattggaagctccttatgggcaaaggctataatactgtgcctttttttccccagtagtgagctcagtgactggaacatactgcttcaaacttttgaacagtctgcactttcctgtgttgtgtgatgatgcccttaaactgcctttcgtatggttttggacctttatacagctcaggacaacaaacagtacagtctttcacatgatgatattagtaccaacgttttttttttcaatagtcactgttttgccctttcagcaatgagtttgagtggttatttgatcattttactgcattttgctcattataaaagtgagtatacagcacaaactaatgtccagatgctggggataaacagatatgtcgaaccttatgtagcagggttgcatcttaagtgttgttagcttaggcaaattgtactatatgctgtaaagaaagaaaaatagtgtggctaattttaccagtcattcaatgcatattgttttgaaatatgcttggagtaggaggtatgaatcaactaagatgttaagatgtaagtcccatgagggcaaggttttgctcactaccatattttcatgtagaaagtaccttaaacatagtaaacacacaaataattgtggaacgttagtcgcttttcccttattcagtctcaattcctgcaagtctctcaaactataagcatcacattgtcctgtgattccggtatttaattatatggatttttttttcatacaataaggcctctaaatgcaagccagctatctcacctggttgaaacagccatctgtgctaacatcagtgacacagcttactgtgtaggacttaactggttggcctccatgtggtgtctgtgaaattttcaaggattatattagctgacttgaaaatagccaactgaatgctcccttaaaatggaaacctgctataaaatcaagacggaggaaaatcattagatatacagtaagttatgacctcagttatatgttaggtggtcttacgctagtcaagagactgtcgtgtttacctttgaagtgctggaaatatatcccttcagactgagtcccaaaggtgaggtataagtagaaattttgtgatttgaggtggggcatacaggatcccaataacctcctgtttgactttctcacatatggttttgtgtaggaaagtaggaggaactgcctgtgataggttctaggtaaatatttgttgatggatttaacctcagattgtaacataatgaaagagataatgatctctccttgaatacagcttgatttttctttatccgtgattctactcagcccatattttgtacctttgactggttggtccgttttctagtctgcccctttcagtcccagtggaatattcaagcttatagtaaagaatgaaaatattatcattttcaaatgaccacaatctaatttgtaagtgttctacaactgaaactcatttaaagaaaggcaacaagctcaatgataagaagtctaaaaaataagagtgaaaatgttcctgcctagcctagtgtaattatttttgctgttcagttgcataggcaggctgccagaagatgggggtacgaattaattaaccaactgtttgcagagatatggccatgtaattactgataagcatggacgtaaataaggcagtgtgtcgactgtttttcagaaatgagggaagacagaaatatgttaacaaaaataaaatagaccaaaggcttagtaggggaaaagaatagtttctgttggtttccatttattagcgcataaagttcttttttcttcttgtctttaagtgctgaatgtggggaggaaatgtggattgtcacattagttttttcaaaaatacttgaatggtttatgcctcaaatgaacatatttggaactcaacccctactcaaatcattttcaatataatttttttgtacaccatagtttggggtaatagaggtttattaggccagtggtgaattttaagtagtattatgtgtaaaagtaacttacgtgaatagttttacatacacaagtgtcttaaagtaaacagtatttgtaatgtaagacgctgggtcacttctgtaagagctgaatttttaagttacttgtttactcttccctagagatgaaacatagtaggacccttagtaaatatgtgttggaggaaggaatgaagctttgtaaccagtgacgtatcattgcatgctggttagggactgggatcaggagtcaactagttttaacctttaacactagccccacctcttgtcagctgtgtgatcttgggcaagttacttaatcttgcggtgcctgcctgtttcctcatttgtaaactggggttaagaatggtacctatactacagggttgcaaggattacgtaacataaagcatggaaagtacttagcacactgtttggcccattaagttctcaataaatgtttgacatggtagctgttgttaggttgtattttaaacatttgcctgaccttttacttcagaagcactcgaaacaaatctgggaagaaataggtgttttaggttgagacatcaatctgaattgtagctggtcagggtgttagctgccaaccacatttgtttgcatatggttgtggtaaagtgagctttgagtaccttgttcaggtatgttgaccaggttccccgggaaggacaaatagtgaaactgcaaagtctgaagaagtaaaactgagataagagaatgcatgatactttcttgtggaagtattgccattaggtcttctagtttttgaaacagaaataagcagatgaactaacgatcaaaacaaacttgcatttaagtatttcccagtggtaataaactgcacctaatctgtttaaacagaaaaagcctttgtaatattaagaaggattaggagtagaagtaattaaccagcagttaacactcccctttcccctcttcagtgttgccttacaaatctctcccctcccctttccaaaccagagaaagcagctgtacacatgggttttatgcataaagtgagacctaaggaaaatgcattcaaagctaaaaaggtacaatgttgagagaagttggcattaaaaccaaaagaacagttcacacttacaggacctggtctgaccaagtgctgtcagctgtgaggcaccatgagtatttatggaatgagtggaaaagtgaaggagtctgattgatttgaattgttttcacaagcatcaatgaaagcattaagttgatgtgtatgagtgcaacagaatcttttggacacaggagatttatctttatttttattgtaacttctctttaaataaagctacctttggggaaaactttagttcacttcagtgtaagcaattagtagtttcagatattaatgcatggttctcatcattcttggaaccatattttaaattcctgggtgactttgaattattgatacttagtatgtgtgccttgccttttaaaatttttttaatttttttttttgcatatggaagaaataaagttttaggacttgatttgtaagacatttgcctgaaactaggggagaatcttcaagatgatggcttctttggtatcttggctgtctcagaggcccttagaacttagatgtcccacatatatgggcttcattctcagacctggcattcttccaggattctttctcagagactgatacctcttatccatccatcctgttctgtaagatgggaagcatggcatccttctcttcaccacctttgtatccaggctattacaaagtcatgtcaacagttccttctaaatgtcttggaatcctttctttgtcatctcactgccatccccatgtctttcaccctgtactgctgcagacagctcttgattgacctcctcacttccactttcaaaccaagcacctcccttccccatactatagtcgaagcaatgttgaacataataataaacaaactgatgatattatccttcattaaaatgcttctattaagcactaacgaatgtcagagtaaggacctccaaaaatctgctctgccataaaagcaataaaagcactggcaagaattgtcaaaatcaacttgtttagaattgtgcaaattaaccccaaaggcttgcaaattcagatgagcatatattcaagaaaaatggctgaatctgtaagtacagagaattctatagtgttttaacttgccctatttcaacctctcctccccaactccacagtaactttgaaaaccagcagcttcacaactagggtagccgtgaaagccagcagtctagcagccactggaggggacagaatgggtttggaactcccccaaagccttattttcagagaattgtcactgatgtatctggtagctccctgaaaagccccattctcaggacttgtctttatttgggctagctcagagctcattctgtgacctattcctagggtgttaaaaaaaaaaatcagcagtgattcttcaatgtcacagttgcttgaggtggtaatgccaactggggctaagaagaggctgaccaaaaaagtaaataggaaacactggggaatgagatgtcagttgggggcttcaaagagttccaccatactcctgggaatccagaaaaccacatggatgtgtagagttgtgcgcatgcccagaaaggacctgagaaggccctaatctcacctcttgctaacctggaggctgtatacaagcaggaagtgaaggctaaagcagagtcataaactccctgctggagcattgaggccatgccccatcacacacacacacacacacacacacacacacacacacacacagcccctcagccaaggctgggagccttacggcagacataaatgctacattaaccatttaaaaacgtaaagacaggtcagtagccaatgccatttcataattaattctgttctaagttgaatgagagccatggaatttacacaatatacctgacagatgtggtgttgcaatgaacaaaagaaggaatggtattcttaactgagtcatgagattataatcataaccacaataataataatagtaacaaaataaacactgttctttatcgagcccttatgtgtacactctgcttactgtgtttagacagatatagaccgcaactttttacatgaattatctcattccgtccaacagtccattaaagttgatactatcattttcaaatgtagaaactgtatgcctagatgtgcctagaggttaagtacattgctggagattacaaaaccaagctaagtggtagactcttagagcccgtatcctactctagactacatgcttgtccaaatggtagggatgcagacaagatttataaggtttttggtaggcacttccagatttgggacacatggcattgaaagcttgttttctgacttgagaggtcaggatttgctgacagtattttgaggagtagcttaaggaacccgtgagacaaacctgtcgtgtgtactgccatgttggtcactgttgtagccccacctgccattcctaacgcaggttcctcaggattttgatatttgcctactctattctatccccagcattttatctcaatttcagtacaagcaatgacaatgtaaacactgtaactcttacctgttaggggtcactattgataatattggccatttgtaattagtgagtaattaatattaggaatattttcatctttctagctccttggtcgtctggtgcaggggtccccagtctctgggcagtggaccagcaccagtctgtcagtggcctgttagcagtcaggctatggggtggggggtttgggagagagagaggaatgagcattaccgcctgaactctgcctcttgtcagatcagcggtggcattagattctcacagcagtgtgaaccctattgtgaactgcacgtgcaaggtatctaggttgtgtgctcctagaatctaactaatgtctgattatatgcggtggaacagtttcatcctgaaaccattctctccttgccccagtcccatggaaaaattgtcttccacgaaactgttccctggtgccagaaaggttggggactgctgctgtggtttttgttgcttgctttttacttgaaacatctcactttattttctttaaatctagtatttattgactgctttggtttacgcagggccagacctcatacatttagtagcttgctgattggtctctcgttggttccatcatttgacatcttttggtcaaagggaaatccagttatctttaattattggagtagacaatatgaatctgggagttgtgcttatggaaggtggaaataaaattctacctttttcctttcctacttgagactaaagctcacttaacagcaatttaaaactttaaaaatatcattgatgctacttttgattaccgactattgagagtcacctgttgaaataaatttggaactgactgtagtaaaacctgttacgtggagaccagccttcctcttctctctggtttcttagaaatatatccaacaatggagccgagagtcctagcatctcaggaaacctatgagcagcggtgagagcagacagtacagaggtacccgcaggagtctgctggcagataggaacagcttgattgacttttcatgaaatgagacagaagagcagggatttcctgggagaggtggagagtaattcaagaagggcactgagtagtggaggagctcatctaataagatggtaaagagcatgtactttggagtagcctaccttcacatcccagctcctctgcttactgactttgtgacataaggcacacagcctctctgtgctgcctcacttgctttctataaagtaggttattgaccctgagaagtcaaatgagttaatacttagcattgtacgtggaacacaggaggcactccataattgtaaactgttttatttttgttatacgtatcaacacttcgcagggttttttttcttttgtgtagggttgtgaattttgttcaccgatatatttacccaataccttgaatagtgcctagccagagtagccattcatgtatttattcagtgcataaatgaatgaatgatgtatttagaatacctgccacaataactgacacccattaagtacttaatacatagtgttacaagaggtagtggctacagaccagtagagattgaagcagtggctagtgtatcccactgatagtaaaaatagaaatgattgtaatagtattacatacatagcacatgctccatgccaaacacagttacaaaagttttatgtgtggtaattctctttatcctcataactacccttaaggttgctgctataatctctattttacaagtgagtatactgagcagagtaacttgcccaagggtcatgctcctaatgagtgataggattgggatttgaactcagttttattccagaggccattctcaaatttttttgttgaaaacctgtgtgtcaggtactgtgctatgtacttgtggcccctgacctcatggagtttaaatcttaatgaaggagatagccacaacacaaataagaaataactgagtgacaagagagaattgtgtgaagccacaggggcctgccttaaattgggtattcagggaaagtctttccaatgaaatgtgagctcaagcctagagccaggcaggcaaagcattccatacagagggaacagaactagcaaagggcccgaagtggggttggcataattgtcaaggatttcagaatgccaaagcggagagttcgaagagagcagtgtgtcttgaggttgccgatgttaggcaggaccctccagtatttgttattattctgactacattgtagaaccactgaggagattaattgggcctgatgacatttatgatttaaaagtatcactgtggttactggggagcagggggagtgtagagtgggccctggtaagcacggccagctcagagaccaaaggacgacagtggagaagatgataaaaatggcttgaatttccaaagtacttactgtgtaggaggcactatttgaagcatttacatatattcgtgtagtcctcctagtagtctgtgaggtaggtactttgactttacccatttagaaatgagaatattgaggtataggctagtaagtggcagggctgggatttgaacacaacttgagttcttctattctgtgcctaacccttcatgtgtttatattagctgcagtaaagaaggaagaaactacagactcatctttggattccttcctctgcctcagcctcacatccatggtctcctgagctctttgcagggtactctagaccatgtcttcagtctggtttcactcattttcattgtatagtctcttcctgtctcactctattgcatcagcctttgggagctgccttccttacctaggtcaatacacattcatggcagagttaccttctggatcttgtggtttccttgctaaaagttgtaggttgcccttggcttgcagtattggccctctgctgctggagccccagcatgcctcccctacctctcccttgcatggccttcagggaggagtgtgtggccagcagtaggagcacaagaccacttgagagttaagctcacattgtgaaatagtcagttgctaattggtgtatatagttgttcccccgtatctgcgggggatactttccaagatccccagtagatgcctgaaactgagggtagtactgaatcctatatatactgttttttcctgtacatacataactatgttaaagcttaacttataagtcagacacagaagagattcacaacaataattaataataaaataataataattataacagtatgccagcatttttattcttgtgctttggggccattattaagtaataagtattacttgaacacaagtactacaatagcaggagttgatctgataactactaagtgactaatggacaggtagtgtagacagtgtagatatactggacaaagggatgatacatgtcctgggcaggatggagtgggatggtgcgagatttcatcctgctgttcggaatggcttgcagtttaaaacttagaagttatttctggaattttcattttaatattttcagaccacaggtaactcacacctcagaaagcaaaaccatgaataagcggggattactgtagaccagacttctgttaattagtaagagccggggaccttgagacaaacatttctaatgtggatcaattttgtgagttatgtttttttttgttttttgttagtttttggtttttgttttttgtttgtttgtttgtttgagacagaatcttgctctgtcacccaggctgaagtgcagtggcgcagtctcagctcactgcaacctttgcctcccaggttcaagcaatcctcctgcctcagcttcccaggtagctgcaattacaagtgtaaaccaccacacccaactaatttttgtaattttagtagagatggagtttcaccatgttggccagggtggtctcaaactcctgaccttaagtgatccacccacctcggcctcccgaagtgctgggattacaggcatgagccaccgcacccaacctgtgtttttgttttcttgagctaactttattgagtgattactatcagtagtactaagcgctctccatggatcattcagtcttcacaatagtattgtgaaacacaggtcctgttaactgtattttagacacagggcaactgagattcagagaggttaaataatttaaccatgctcacatagctagtaagaggaagagtagacgtttgaatacaagtagtctcactgcagaactgcttttagctactgtgctggattcactagcacaaaagaatttgtcaacatgcagatttgagaatcagacattgaaatacagaagttttactagaaactgcctctaggtataaaatgttttcagggaagactattgaacttgaacttctctgtcactgaatggcatacccaattccagcagatgatgaccatgtgtcactaaatgacataaaagcacaattataaccttctgacttacggtggcatcacaaggacttaatctttcaattattattcatcaagtaatatttagcacatattcattgctgctttctgtcagccaggttaggcaccattaggcactgccaccagagcagtcaacaagatagatatggaatgtagtctagtgggaggaagttaaggcttgcacagctggatgaatgtttacaaatgggagatagtgcttggctaggagccctacctagccaagtctctggggaagccacattgaagctaagaccgaatgaagtagagcaacaagccaggtacaggtctgggggaactgagttccaggcaaaaagagcagcaagtaccacacaggattctgtgacgagagtgtggtgtagttcaggaacaaaaccaaggccagagtaaccagatgcagagaggcagggccaagctgttcaaggctggtgggctaggtcagggatcattgcttttatcctaagagcaactgaaagctacagaaaagttccaaatgccagtcatttacttcataaacacacagtgatagggaacttctcaggtattgtgctaggcaaggcaaagagtctgctgtccagacaggactactgaggtttccatttgtaaatttttattcataaatcataaatcagtgagtgaagggctgaaatggcaggcataaagggtatgagtaggagcctagcagagagggcattggggctagttcttgtcgaacggtgggaattgtagaaagagcagagagaagagctttctatgctgtaggagctgttctgtccaaaagaaggaattgtgggccaggcgcggtggctcacgcctataatcccagcactttgggaggctgaggcaggaggatcacaaggtcaggagattgagaccatcctggctaagacagtgaaacccgttctctactaaaaatacaaaaagaaaattagccgggcatggtagtgggcgcctgtagtcccagctactccagaggctgaggcaggagaatggcgtgaacccgggaggcggagcttgcagtgaggcgagattgtgccactgcactccagcctgggcgacagagcgagactctgtctcaaaaaaaaaaaaaaaaaggaattttaggagaacaagacaggttctgagaatgacaggagacttgaggcagaatcacattgactgaggctggagagatgggagggaccagaatgctaggtaggcgccttgttgcagagcagtaggtccagagtccaacccccactttgaagccagcaggggtcttcaagtagagaagtggtattattgctttacaagtttgtgggctcaggcagctgggaggaggaggctacgtaagaggaacaaactgtggccttgttaggagacctgttcaggtgagtagaggccccataccttgaccttgggcactggcagtgggagtggcactggcatagaggaggtgattctgggagaatactggaaattgccaggggtgttatgagtctagcagacctgggtttaaaccttgggtgtgctatatactagtttgtgagatttcaatcctgtgtgccttagtttcctgacaaataacaatcatgacttttatctcatagactgtgggcaaacattgagtgagcacttcctagggccaggtgcatttctaagactggcatgtagtagctctcttagtctttctgtcctttgaagtacccagtgaagtaggtactatggtcatcacggttcaatatgtgaagaaaatgctggccaggcgcagtagctcacacttgtaatctcagcactttgggaggccaaggtgggaggatcacttgacccaggagtttgagaccattctgggcaacatagtgagacccctgtctctacaaaaaataaaacaaaattagctgggcgtggtggtgcacacctgtgattactcctagctactcaggaggctgaggtggaaggatcgtttgagcctgggagattgaggctgcagtgagctgtgattgtgccactgcactccagcctgggcgacagaaaccttgtgtctggaaaaaaaagtgataatttgaagagattgtataacttgcccaaggtcacgtttcttttgattgagggaaccaggattcagagtgatactgacccacactcttagccactctgcttaaaatgccagtgatagtaactaactggggagggggaaggaacagccctttgaagtggtgacagctgagctgagacctgatgtgtgagaatacaccaggcatcttgtgaagtgcaagcatagagtctggctggggaaaaggtttctgggtttgaggagagaagggaggtcagtgtgcctggagcagagtgagccaaggagagagaagtggggaacgagggaacagaggatgagagggaagtgcaggtatatctggcaggaccttgggagccagggtaagggctggagttctattccaagaggagtagaaagccactggagaattttaaacaggggagtgatgtgatctggtggggaattttaaagaatcactctggcagccttgtggaaaggtttgtagactacttaggggacttcttccagagttcattgaaagggtgctggtggcaggcccaatagtggtggccatggcagtggagagaagtggatgaagattttaggatagaacttaactgggtgtgctagtggcctgaatgtgttgagggacaagagagttggaggtgacacctgggcttttagtttgagctgttgggggatgaatagtatcatttacccaaaatggggaaggttgttgggtgaggagcagagaagggtcaagagtgaagttttggacatgcttgttctgtttgaaatgtatataagacatctagatggtaatgtctagtaggcagtctggtacgtgaaactagacagagcttgggagcagtcggggctggagatagaaacttgtgagtggcatgtagaagtttgggatgcgtgggaaaagggagacacgcagggtactgggcaggttaaatgctttgcagtgccattcaggttttcttgttactgaacaaagtcctcaaaatggagatagcaacaccaaagtaaatacattcaccacagtttggggtatggtttctagcagagggacttcattctgcatgtgactgaagtttccatatacatgtgctcaagtgtccttgtgcttaaacctaatcctccctagtatgctggcctggggtctccaaagtacatgatggcctagatgtgggtgctggcccactcactaattggaacataggggtgacctaaatcctgagaaagatttagggcttacacaacaataaaatccattctttcaaattcgtttagaatccattaattcaagtacaatttttaaactttatgctcaagtacataattaatggcctaagttgtatattacaagtatattttgtaaactttttaattgaataatgaattcatttttattaattttatatttttattttctgttgtaaatcaagcttttcacagcatttgagcaagatccctattttaatttgcagacgggttgattgtgaatttatgctttaaaatatttaggaacatacatactgtctctcacacacacattatttcatttctttctgttgccacaacattccacactctgttcctgttgctaaggcccctggaatgtcccagagcagaaaaagaatatagaattccttttttttttttttttcctgaagaagcattttatttaaattattttgtatcctctagtttacttccaaatatggatatctgaaagtgaagaatttagaaagctaaaattaaagttgctttacgttttcataaaatgaactcaatttctttttctttttgtgagacagagtctcactctttcacccaggctggagtgcagtggcgcaatcttggctcatggcaacctccacctcccaggttcaagtgattctcctgcctcagcctcctgagtagctgtggttacaggcacctgccaccacacccagctaatttttgtatttttagtagagacagggtttactatgttggccatgctggtctcgaactcctgacctcgggtaatccgccttcctcggcctcccaaagtgctggaattacaggcatgagccaccgcgcctggcccagggagctcagtttcatagggtagaatgaactgggtttaagtataccatgtttcttcccacagagggggtgtgtgtgtgcatgctttttagagagattcagtgtgctcatgagaaattaagaaccgagttttccggtcacacaaaccagagtcctggttatgccgctttcttgctgagtgatattaaataagtttgtttctccataagtaaaatggggattattatgtagggttattattagaaataaatgggaaaaaccatgtaagaactgcttggcataggacctggcacatagtagtctctcagtaaatgtcagctggttatcattatagtcatcatcagttgcaattgatcttaagttattgaggaaatagaaatttttacagaagtatagattcttggttccttacaggataacccctatctttttagttttactagtcctaagtctcagaaaaggatcaaaggaaccagggcaaaaaagaataattttgtacatgataaacatcatgtgacaaattgaatccttattatttgaaaggatcagtttaggtttttatttctcttaattgctttatttttaaaggggtagagggttagtccacagaagaatctggtatctggcaaagtgatctattttaagcaacagtgctttacattcagaactgagggaaatcacagagaccaccagcagcacattgcagagacctaaaactaaactaacactgtttatttaatactgttttaactgctatctaataataaaactaattgagttgatttcattaatgaaattgttcatttgatatctatctcacactcttcagttgtaaattatgaatgttataccagttctgtaatttagatgtatcagaggcatttagcacagaagcatatggaacttacggtaaatgactttaaattttatttttcagaatgaaatgtcatgtcaagaaactgtaatcttggaaagtgacttattacatgtatatcattgcatagatataacctttccccttctcccacatgtactatatttaactcaatgtgggcaggctttcagggaaaatagcatattgtttggctcttattttttattaaataagcgtagtcacagaagtctgtagtctactggaagcttcttatctaatcagtttataccatcaaagatggtcagccctgacattccaatttattgacattggaatctggaaggactctctagatatcattattcctctggtcttcaagaggtaagaaatccaagccacattataagtcagaattgaattccagctattgaccttagacaaagtactttacctctctgtgagtcagttttctcttctttagaggggggatataatgatgtctacctaggtagttgtgaggataaaaatgaaataatagcttgtagaaactactcggtgctgcaagtacatccccaaatcgtgctagactctagtatatttcggattatagctagctatctgtgcaattcagtgtaatagaaactgtttaagaaaattcaagccatagccatgtgtagatactagatcagtaatttgatattttagagattatcctcacttgacatctccttaaggaattttcttctccctttaaaaccaccaggatctccccggctggagaaagtgtgaaattaaatcttcataggaaagaaagtagatgctaatcagctttttggatcttcccccttgtcctttaaacttggtatttgatctactaaaacttttgcttaaattgaagtgtgctaattatccattcattgcagatattctaaagagtgaatgtagtgtaaaatgctgtttaaaatccactgattttgaaatacttaaaaagttagattctggatctgaacttttagctctgttccccaaattgttgttcataattaattgaatggttgagatgttttagttaaccatatttaccaggtatcaagttactttcagttttcatgtatatgcagacagtttagttttacttttgcatttaattaagttgctgtcttactgttaaaacaaacaaacagctcgtatcctaccctattttggtaaccaaactgattaatatatgaaatgctgtttgtactaaagttcattctgcctttctggtggcattagtatgtaagcaaaaggactagaggttgctatgacttggaaaaaatatattaaaataattttctttatatgacatgctggcaaaccagcagttctattcctctgtctctgctccctttcttaattgttccatagaactcaggaaccagagagctggaatagaatgcacagttaaacaaaagcattagatggtacagctttgtgaactaagcagtttacatggttgcagattctttcccttaactcttggtagagttcatctaatgttgctttattgtgcaaatatattcattgtttgcattttaaaagattgtttcaccacatcataattatttttggtgcactttaaccctttttaaagtgtgtctgtaagcctgatttgatttctctgtttaatagtggtggtgtaccacatcagttcatttgtcctggtatactttacaataaggcaactcctttagaaagtagtttcccaaaatggttttatatcagtcagaaccagatgagtgagtgatgctctgtttctgtgttgcagacatgccaatatttggtttctgtccagcccatgatgatttctacttggtggtgtgtaacgactgtaatcaggttgtcaaaccgcaggcatttcaatcacattatggtaagtgcttaaccatttaaaaaattgttaatagaaggtaaaaggtaaagcaagattaaactaaggaacagtgatggcatgcatgggacataatgtccctcccccaccaggaagtaggctttttaattcactcagtgggttaataactatcagatgttgggtatttttaaatttttattaaaagtgataggaattttttgacttttattgaaattagagaaagtatagtttataaaatgtctcttaaaatgttgcatcagtataattacaagtttgtttccttctggagcccctggttgtgaattcagtggattttaaaattatatacactcacaatatggatgcatgggcctttttttttttttttttttttttttttttttaaggaaatgtgattttgaaacttctctgttcaatagttctaaatattgggtgttaattgttgaagaatccaaatacagttagttggcattgtcataatgcctttaaagtgtttaagattctgattctaaaacttggttttctgcccagtttggctcaatagcaaatcataagtatttgaatacgtaccttgtttcaggcattgagtatgtagtatgattcttaccgccacagagtttacagtcgaattggagaggcaggcaaaactaactagatatactttaaaaataactataagttttttcctcattgctcttactactacaaatgcaagcttgcaatagagtaacattggggttcttctatagatagagtgtttaaagaaagcatcttaggaggtgacactggagctgagtcctaagtgatgagaaggagcaactcgggcagcaatctagaataagagcgtttgatgcagagggaacagccagcacacagaaggcccgtgtggctgaagggtatttagtatttagagaagggaggtagaaactggaggaatccagcattataagcaggaacctgatattcataggccaggctaagaagcagcttgggagcactggaggatttatgtaagagagtaacacagtcctatttcagtggttgatttgctgagaaaaatttctgggagaaggacagaagtagggggaatagttcagaggcaagagatgacaccggactgagagtaagatctggcagtagagctaggaagactgcatagctttgagatacttcttttttttttttttttgagacggcctctctgtcatccacgttggagtgcagtggtgcgatctcggctcactgcaacctccgcctcccagattcaagcaattcccttgcttcagtctcctgagtagctgggactacaggcacccgccaccaccatctaatttttgtatttttagtagagacagggtttcaccatgttggccaggctggtctcgaactcctgacctcaagtgatccgcccacctctgcctcccaaagtgctaggattacaggcatgagccacgcgctcagccaagagacgttttaaagttagaatttacagatcttggctgtcgagactgctgttgttgggttaagagtcacaccatcataagcaacattccaccattttttcaaggaataataaatcctttatttaaccataaaaagattctttgagttcctgcttctaggagaagccctagggtaggcactagagtgggtacagaggtggataagatgtcatttccctgcttctgagttgtggacaatacagacaatattttggaaaaatcacttgtaatgcactaaagatgggaggtgttttactggggatagacagagctgccacatatggctgcacagtttgtgcactgaacaaccatatttggtggccccggattggcaacaaggttgacgtgagcaagcacaggagcaggaaattccaggctctctgggatgtgctgcacgagtcaccattggccagaactgatgtacccacctgtggatgagtggagtgcaaaggcaggctgggactagctcacagggcctcagtgccaatcggagttccctgctctggacgtgttggtgaggacctgttgcagattttttagaaccagagtgatgtgacttagtggtgccccagagaattgatgggtagagtggattccttaggcagaaagaagacctattctaggagcatttactcactggttacagtatacttattttttttttaatcttctcatttccctcttagaatatcagtgtacgggtaggaaaaagtgtttttttttttgtttttttttttttttgagacggagtctcgctctgtcacccaagctggagtgtagtggcgccatctcggctcactgcaacctctgcctcctgggttcaagcaattctcctgcctcagcctcccgagtagctgggattacaggtgcatgccactatgcccggctaatttttgtatttttattagaaatggcgtttcaccatgttggccaggctggtctggaactcctgacctcaagtgatttgcctgcctccccttcccaaagtacagggaatataggcatgagccaccaagcccggccaggaaaatatcttaaaatcacatttttctgtctttctcctttcctgcctttcagtccctagcacggtatctcctaataagatacttgttgaatgacaaagcgttggtgataacttcaaacatgtaaatgggaaagtgtgaattcaagattcatttactccaaggtctcctgtggcttggcaggagatgtgactgacaaagccactaggtaggagggctgaggtccctctagtgacaagggaaatattaaagatatgagagaggagagttcctggcagaaagatgagggccaagtgctctgagagagggattctgctgggaaatgtgtaaggaatgccctctttgaatcagcagtggagatggctgctggtggaattgacaagaggtttagaggtggatgggggtttgggagagtaactgcatgaagtagagggaggcaccatgtggtggccctggagtgacaccccacttacttggagggaaggagaggtgggcagggttcccaggaccaacaacctttcccagtgctgccacagtgtcgtctatcttttggggacaggggttgtgacaggaaagattatttttggtacattttcttttttgttgaaatttttagaaagccagttgttgcattattgttttccacagttaacaaaacacagttttcaaattcagaatctttcacagtgactgttgtagtctatttacgtgccaaaagagggatggtattttctttcagtgatattggtgaaaatgtgtcggcagtcttctgtgaattcatgtattgctgatatccatctgtgacttttatgaacaaatgaatagttcctaccaactccagcaggcagttccgttaaaaccactgctaccaggacaagaaaacatgctaccgtggcagcaagtcttgtaaaatcagtcagtgttggtggtaaaactattctgaattggtgagcagcttattattcggagtagttaagaagccctgtacttttttgctagccaagctgcagttttaggagttaacaattaaccaggatttccatttgagcaatgatggtgaatgattgtgctgccattttggcatttccagttttttcagtctgattgctctcacagcatagtttgctttcttggaaactacatagtaataccatgatttcttgatgttgttttaatgttttaaaatactccagtgtgcctcatatttctcttcagttacttagtatttttaagaataaggtgtgaaaccccgtctgtactaaaaatacaaaaaataagccaggcgtggtggcgtgcgctcccacttgggaggctgaggcaggagaatggcgtgaacgctggaggtggagcttgcagtgagccgagatagcaccactgcactggagcctgggtgacggagcgagactgcatctcaaaaaaaaaaaaaaaaaaaaaaaaaagagtaaggtgtttcttactgctaatttcagatttaaaaatataattcgaatcagtggatcccaaacctgctgtgcatctgaatcaaagaggagctttctaagtgagcagcttcccaaggcccactccagatgctctgagtgggaatttccagagatagaacccaggaatctgcattctaaacagctccctgggctgattctgacacactggctggctggaatgcattgctttcacagatgcagatacagtccactctggtggagctgctgcttggtacatacagtgggagacatacaatgactgacaagagattggtgctcagagattcgttgagccaaccagaatggcaggaagggaggcccctactttttaaagtatgtgtattatgtgctgcaaatgtcacattaattgccagagaacttttaagtaggaagcagcgttgagatggtgacgttccgaaagtcagaagccccattcttttgaggtgggaatcttaagttcttcagttagtttagtgataagtgtgttggtcctatactggctactgaatagcataaactgtgtagtactacttacatgcatttactctggatctgaatggtgggattagcacagggttagcagatgacttgtggggtgtttttgaggctgtatactgagagcttcccaggaattcctattttgtgctctgcagcttcactgagtttgcttatgaagaataccttaatgtttctcttttatgcagacacaggggtgatattacctaggagaaatagatgaatgatgtttattcagcttggacaagtaccacatttagaatctctgtgattaattgaaaccctactcagatgttggctgtttaagtatttgcttcagattagttaggctgatccatttgttcacctttgggctcagcttgagtctctaagcaggttggagcagccactttttcccaaccttaatcaagtgctggttttatcatctgctgacttaattccacttagtatttttctttaaatcagaccacttttatttaaataaatcaatttacaaggaaaatcttagtagaacaataaagggggaaactagtgttgtctgctataagaagtagtaaatgtgaaaatgaatactgtgaaaagaaaattatttaattttatgttgatgcttttgccagtgctggctctgagcctgaggcttgctctctgttaaaatggagactagcacattttaggcaagtgttgtccacacagtagtgtgatattatcaggaaaatggaaagagattggaaagggagtaagttttcacttgtcatttgatgttattaatattagagagtgatacctactccatattgttgggaaataccagctcaagttcttgaattttgttaaatcagatgtttaaagagctatctactgaggccagccttagccctaggaaataacagaccttgaaaacagaattttagaatctcatgttgatctgtaagaagaccacgtaagacaaataccctttgtcacctatcgataatgttatatattgagccactactgatcactgtgaatggtatttgagtctgttggtgaggcttcagtgtaaaacatctgcatttctctcagactgttcacaaacggaagtgtcaaaatttggctttttcatgactttatgaacgtagttttagtagaaacactcctgtgatcttacagctttctctccttgcacatattacaaatcctgtaaaattaacagccacacacattgcttggacttaatgttccttgatatgcattgaggtggtttggattcttttagatgctatcataaattatattttctgaaacgtcattttcatcaggatgaacaaattacttatatattcatatgagaaattactcatacttttttgagctaagtaattggtttcaaagaatgttagtactataagagaaaaatgaattttttctctgagatctgatggactggttctggcaaaaatgctggttctcattgttgacaacatttctcatagttctgaccagcaattgccatcgtataattatcttgcatcacaaagcaaaggttttaccatttaatacagaacacttccctccccttttgctctctgattaacttagacctggaaagtaacaggttcagatagtttttaacatgtcattttatttagctcataactgtttttgataaagaaagaaaatgttttttttctcttaagtatgctaaatttaagtccactgactaatgataacttttaatagtacctggtgatttacagagaatttttgcatgtattatcttatttcctgttcttaacaatccactgaatagattttatgcttagtttacagatcaaagtcgtaaattaaatttcattcacacagataaaatataccaaccagaccatcttttctacctactaacattgatttattttgcatgataaggatgtatagagtaaaaaaaattcggagacaatatgaattgcatgtgtcacaaaactatcattagtgacagatgttctagctgaagtagaattttaagtttgcttcaagaagctggatcagtattgtaaacctgttacctcagaacatttagtaattcaaagatataatgatggtaggtagataattgatttagcgtagtcattggatttctcttctgcctgttctactttatttaattctaaatcatagtcgctatctaaagccaaactcctcctctttttgtatgagactcgtagcattttgtagcttctttagagaattggctgacatgtttatttctgcagtcagtataaagactgaaacttgttgcagagcaaaaaaaaattacctcactcttttgcttggaagacttgtaccaggtctttctccagcagtcgggggatgagccagggatgggagctaaccaaaacaggcacatgaaaacatgaatgatgtcaaggtggacattagtttaactctggaaggaaattccaggttggccttttgccctaaacttcttgtcattaagtaaccatttttggataaagaaagaaaatgttttttatttcacttgtcatttattgttattaatattagagagtgatagcgtgacatacagtgtattcatttttttctctgctacaagtgaaaaaatgctaattaaatttttcagataacttaagtagcattagataaaggtttattctctctcagctaatataaatttatcttttttccttagttgtattataagcaaatatctttaaaataaagttatgtcatttgtaggagcaacattttaatttctagatataaaatgtacttatttttcctcttactgatatctgtgcttttatgaatgtctgtgcctttggggctgctttagaaaggaattaaactagcaatggtattattcatgcatttaacaaaatttactggtgcctaatatatgctaggcattgccctccactgaggtaggaaaacagtgtctatgatttcatgcaccttatattctgacttaatacaatacattgtattaaggaggagagagaaaaatgaaattgtgtgaaatcagattgtttcaggtagtgataaatgctaggaataatgtgagagaaaatgactggggcagaccactttaggtaaggctagttaaagaaagcctgtctctggagttgatgtttaaactcagtgatgaaagagagccagcccatttgaagatgtagaggacaagtgcttcacatagaggaaatagcaagtgcagaggtccttagatggaagtggtcttggcagaaaggccagtgaggaggcctaaggacagtgtgcaaggaggaaaggggtccaagttgaaactggagaaagtgggtccaggaccagatgacactgggccctgcaagccatgagaagaatcaggattggacggcgcaggcaatgggaagtcgctggagggttttggccaggaagtgttatgatcacgtggttgctgtatggaacacggggcaaatgtggaaccagggagaccagttagtgagctgttttatactagttaaggtgagagctggatcaggagagaaagcttagattaggattgtagcagcaggggcagagaagtgtgaacagaattaaaatctgcatcggaaatataaagccagcagggcttgctgatggactgggaaaggaagggaggaggaatgactcatggggtttttggctcaagcagctggatgaatttacttgagcttatggatcaggaggttgttctttcagtttgtatatgggcatttatttttaatgaggtgcactgacctgaataaaaagtgttgatgtattatattaagtctttaggcattttctaaagattatagaagaaaataattattgcagtgatgccaagttgggggtggggggtcattttttcttttcagttttttaatgtttctgtaatctagtcatacaagccaggaaacaaaagatactgtgtgcactttcctgggacttctcatgtattcattgggtaattgtgaaaatttattgactaacaaaaaccactgcctttcaatttgtttttaattattaaaataaaatacattgtaaaagaaattaaacaaccagaggataagtatgcaatcagactgaagaaagctccttcatcttacttttcaggggtacagtttgacatgtactcttggagggttcctagaacctggacaaagtaatatttaccaatgtattttttcccctcacataaaaaaaagtagattcagtgtgaatttacatttttaacttaataatctatctaaaatattttttcatgttaatacatattgttctgctataatctttttaaggactgcctgttattccactttattaatgtattttcacttaacctgactcctgttgatggacacttagatcttcagtgttgcattactgtatacagtgctctaaggaccgtccttctttgggaatgtctgtcagtattttagcatattgattctccgcatggaacctggtcacagtgccctccaggtttgtactactgtgatttgatgaactacttcagcagttctgatttgggttgccacaataataaggcagtgaaaatgtgagtttctggcaatatctatctttatatatatataaattgtttataatgtgtatatggatcaaaacattacactgtactgtaaatatatagaacttttatttgtcatttataccttaataaagtagaggaaaaaacagttggaaattttttttaaaaaggcttaataaaaattaagtaagaaattattatttaatatatatatgaattgttgatattcaccagtgtcactcttgacttgcctgctacatgtagaaatcattagctattataggattgccatgcttcagctttaatggagatatttcgggatataaatccatattttatttatattttctaaaaagtacttttcctgacagtcatttcacaagactaatttgtacgatgactaagataaacacacctgcgatttcaaccccactaagctgtgatcttacatatgaccagaagagggagtttttatcacttcttaatgctgtggtacctactacctgactggaataattcctctgatgtatgtactagtccaagtccataaaacagactggtttgggaggggcccaatagctaaatttagctatttccctcatcccacattttgtatgtagaaatcccactcttgaggtttacttcaaagtaattttataccttttcatcttgtgcatttgaatgttaaaaaagaagaacagataattatttccatttaaaataaaatacaaatagcccctgatcacacaatatagagttcttggtttgtattctcttcaggtcacaaataaactttggaatgaaatttgtttcgttgcctcttatgcttgatatatttattaaaaaggtcgttagaacttctgttttgtttttttgagacagagtcccactgtctcgctcaggatggagtacagtggtgcaatctcagctcactgcagcctccatctcccaggttcaagtgattctcgtgcctcagcctcccgagtaactgggactacaggcatgcaccaccacacccagctaatttgtgcatttttagtagagacagaatttcgccatgttggccaggctggtcttgaactcctgacctcaagtcatctgcctgcctcagcctcccaaagtgctgggattataggcgtgaaccaccatgcctggcctacaacttctaatactgaagatttgtagtgagctttagagagttaagatgttattttgccaaagtggctaataggcctttttctgggtgattcaactgtggtctgttgtgctacttgagtctcagtctgcttagccaaacaaattaagagagtgacaataatcaagatacacttgtttgatgtaataccagaattttgtatttcttttttttttttttttttcttcttcaagacagattctcactctcttgcccaggctagagtgcagtggcgtgatcttggctcactgtaacccccacctcccgggctcaagcaatccttccacctcagcccttccagtacctgggactacaggcacacgccaccacacctagctaatttttgtattttttgtagaggcagggtttcaccatgttgcccaggctggtctcaaactcctgggctgaagcaatccacctgcctctgcctcctgaagtgctgggattacaggtgtgaaccaccacactcggccagaattttgtatttaatttttcttagctaccttcacagtgcatttttgtaacacaaattttttagacctgtttctttatagattttttgattggcatatgaatatatgaaatatatacacctataacgtatttttatataaatacacaaatgtaatcatctcaactattttcagtgcagcctttttcttatttcattggctctttcaacttacctgccttctctaactgtagcagtccatgctacgctataaatcatacatgctgcattcttagtatgtaacttaatatgcatccttgtatatttttctcatgcttctaactctatccaggcacatagaatcacgtattttattagtaggggcttttggtgatagttttacaaaaaagtggatcctattatgcacacttctgctccttttctactcaacaatacctcatgtaaatccattcacagccctggataacactaatcccctctttttaatggttgcatactgctctaaagtgtggctgtgctgtagcttcctctgccaggccctctatggacattcattttgtttcttgctttttgtctgtgtgaaccaaacagcagtacccactctggtacatacatacttaattactggtggtttagtttctgtgggatagagtctcaggaagggattcctgggtcacaaaagactagttatttgcagtgttaatagctgctgctggattgctttccaaaaaggctgtaatgctttatatctctaccagccactatgagagttatctccaaaggagtaggtgttgtatttatttttctaagcttccatttaattttctaaagcctcttacaatgttccttagacacataaacacacacacacacacacacacacacacacacacacgtatgattaattttaatttgaaataaattcctcaaacaaccacaagtctagtaatacttaataatatgagacaaagagatctttcaaaacgagtgattattttaaaaaatatttaaacaattataggcagtttctcgggcgtctatgggaagtttctattcattctgtatggaatttaaggaagaaatctcattctcttatgctaggattcccctgtgcaaaatgtgaggcctcctagaggatcataattttgagtgtgattaattgcaaggccaaggaaaaactatggccagttttgtttctgatctccctatcctctttgcagttggtatgactggtcaccttataaaggtgttcattgtgtgtttcaaataatgactgggctgaggtcacgctgtggttaactcaaagcctgtgtaaatcaggccatgaagatatattttatttgcctgccttacacacatgaagtgtggctgagccctggagagccatcgaccaaaagatcagctggaggaaggctgctgcatggttttagcccccaaggtgaattatccccatttaaatttcatctcccacctctcctaatccagtgtgagtacctaatgagctctggataataacatagcaacatttctaggtgaagctaatctgattctggatagcaggcttccaggcccacagccgaatgaattgcttggtatttccaagtttgaaaatacttttttcccctttcaagtgctccttggcagcaggtaaggaatgttaaagctcctgtaagtgccaattaaggccaattataactcacccggcctgctgagacagtgaagtggagttagtggagacttgtattcctgtaaaatggagaactggctttcaccaatgataggaacacagtatttcataactgccaacagcttgtttattgccctccagagcactgaatgacacctctgctggcttctcaaggattcagtttaggaaatcccaagatttgtaggggacttgactaatttctataatagaaacctcagtttttctgtttctgtttaactcctctatcatccatccagtttctccttggttgtaatcataatagctaacatttgctgaacgtttaacaagtgctgggcgttgcattacctgcattatctcaaatttactcctcaccccaggcttgtgggaggaggcagtatcagtccttagctctcctgagtctcttgcccacggctgcacaactagaagtgctcagactgcaggctggctgccccctgaacccaaaccttgagtgttcctcctagcctcctgcaagtttgcctgtttgctgcgaataggctaatgcacagttcagaactccctttgtgcactagagtaaaattgacatgtgtacaccatccaaaccacagctgatacatataattttcggtcagtgaggcacggatgttattctattaagatgttattttagtctgtagtatttttttagtctgtagtcttaatttttttcttagggaaaaagaaatatgaccatgtccccagacctagacaattaacgtctgagccatcattgggatatttaatatcaaaataaactttatttggataggatatcgagaaacggtttgaagaaaattgtgataatgctttacaagcagaacaaagcagtatttgcttaaacattttattcagggcattaagggggcacatgtgagtgtttaaaattttaatctgagctttgttctcaatttctgtgtatgtgtacaaaattaatattttcctggcatacacgaccattcatcccttttctgatgtaggtcttaaaaataagttaaaattcgtttttctcttgtttatttgtgaacttaaatatagacgtttgtttgtagcatttaagaacatttgctaaaattcaccctggttttttacagggttgcagaacgacttgattcttagaactgtcttggattggctgactctcataacgatatttttccccactgtatttcgtacaatcactgtgtacgaaagggaatattagaaaggcaagcatttgtgctaggaaggccagcaaggactctggtgttctgtcatacaagtacagtgatagggaagtgagatttagctccagaaagatcctcctaccctgttcttttctgctattgatggcattaaggagattccttggctacccctgcagggagggcaggtgaagtagggtgaacaatactaagacctgtggcaatcaggttttacagccatggaattttttttttctagcttaagaaaagcttcagtgaattaacttaaaattcttattttcgcttatgagcttttaaaaagatttgggagatgtatcctcatcctgtgcttctaaggcttgctgatggctcttcccttgcgttcttctagtgtcttctaagggcttccatagttttggattgtatgaacgttactgtaaggaatctgggggaaaaaaagtgggtttcagaaaaccccctgggtcttagtattgttgacatgggttgggatctgaatccttgtgaaaatagggcagtgcagctactgttcttctgttttagagtcaatttagaatttggtctaatagaagccgttttcatgcctctctcagaactcttccccgcacctttcaggctaaatcatttccacatatgtaattcatgacttttgccaaatattctgtatggggtgataggattctgtagaagaatcttttgctgcttcttttgacatttaaaagagttcattttgaactatcaggtatctaagtcattattatcataaaactcagatcacttggcagttttttccatgtcacttgtggggattttttgttgttgttttgtttttattagaactctgtcacctgggctggagtgcggtggcacagtcatagcttactgcagcctcaaactcctggactcttgcctcaccctcccaggtagttgggattacaggtgtgagccattacaccccattctgtgtcatttgacagtagatttgttgattggccagagagagggagtgtgatagggatgatagggaaacaggccaggaagacactgttttcaagggggcactcagtgagagaaattcttggatttaaaagtatgaaagctttagtcagtcctctagtgattgaacaacaaactggacaaatgtggatatgaaattatacatattttacaaatatgcacagaaagtgggttcagatattttgttactagatttaggaaggaaaagtatgcttaggaataataaactttttttgaaaagcttagcaactgtagatagtataggggaaataaaacctggaaaaatgctgcaggtattttatagaaatgtttaactttaagacctttaggtctaccgagacttaaaatgtaggtttttaaataaatcatgtaagttttgtaatatacctggtagtagctttgtcagtttaaaggtattcagaaaaaaaattcacaaaatataagtaatttgcattttagcaggttaaacttataaattccatcttccccagttttgacaagttgcctttccaatagaaagattaatttacaccagccaggacgccttgtatgaccatattagatgaaattagactccaccccctgttttctgttgatctgccaggacctttgtaattcaagtgctttttacagtagtagcaaatgttacataagcccaaacatggagcatatttggagttggtgggcagacccaaatcatgatgcaagcctgcagtagcaagtgtgcaatgaagcacaaccaaattctgtgaatggaaggtagcaagacgcctctccaaagcagcccttctgcgcaggagctgaaagctccactgggtaagttttctgaggcagttttcagagtctgggcttggctcagggcccagctctggatgagcctgtggacggtggggtaggtctttgctaaccttacatagaaccaagcagatttgggaagagtttatgcaggcctttttcctcctggcatttgtcttgccttgccagcaggccaggagggttctgctgctcaagtagtggagggagggagcctgcagagctaggggatcagcgtgggtaatcgcagccacagggattagctgctgcaagctgtccacagaagccattctgaaatgtcatttgagtgatctggccaaagttcagatgcagacgggagccgagtttgttattaactccaacaaaatgctgaggtttgcaccaaacagttcccatatctcaaaacagagagagtattggttacatctctctctaaaaatggaggaacgttgtaacacgctttaactgtttgttttttatcttacttgtggtaagtgaggtttcatgacaggcagtttgcagtgtttcctgtagaatgtgtttgaaagctgttttgtcagatacttcaattccacagcaaagtttcaaacagaacactgcgtcaagaggaagaacaacttcaaaatacaaacagtaaccctgggaagtcattcagtaacttaaattgagtgtataaaaatttaattatggactgactgccagaaaagatgattttttttagttgtgttattaaggtagccagcagagctaagctgattcttgggtggatgtgtggaggctggtctcaatattaccttacctgtctcagaccttctgtcttcatgcgggaagtgaggtgtcaattgagttcttcagttttcaggggattcagatttcatgccttgtgtaataatgagcttgaccggaaggttttaattgaggttgaaattgagctccccagttgtaggactttaaatatgaaaagatcttaaacctttaatcaaattgctgttgattctctataattgatttttctgaaaactcttgtcagacagttttaggttcactgtttctgctttcgtttttgcatgtcacttctgatgttttattagttgacagccctggcatgcaggtggagcagatactgtttctctcttcagaaaaaataaatgtgtgttgcagactcattgaaaacattggcattcctgggtaattaatcactcattccttattaaaagaatgtataatgaaggaatctgtaaggctgtgttcaaaatgtgaggtttttcttatttccatgttctggtcttcaggtattctgccctcccccacccagaataaggtgatataaaaaggatataaaaccagtggaaaatggcaataaggattgtgactggctcagtgtagcacttttcagcagatagttttgtcatttcgttgtaccttgcagagttgctcttgtttgttggactgtgggaagatgatgctccctgttgggattcctacacagaaatttctattttaaaagacaaaacagaaacaaccaaacaaaaacaaggcagctcctctaaattgagttttaccaggttccttttattctctctctttttatgtttttgtaaaaattggattggagtggttaacggcatagttttgttttgtttttttaattgtcttttagcattttggtaatagcccatatgtttcatttgggaaaacagtgacctagaccaaattgagactatagagatacttgtgtaaagactgagtatgtttgatgcttgaactacagatagtataacaaattggaaggctatccttataaaggtaaattgctaaaattctaaagtgttcttttccctaacacatagaggattgaatcaaaagtagctagagactggtggattttcgttttggctctctcttttcttctcacctgtatacctgaggtatagaaacagttcaagtgaatgatggtgtaagagggagaaaggggagtgaaattttacaaaatgatgtgcatcactcagatagtgaggtcaaataaatcggccagggtgatttattgctgtactctgtcagcatcatttgggtaacaccgtgctctctgaggatagcagagagaagtccttatggctgttagcaaagtagaagtgtcagccagcatgtcattcattgtgtggtatctgtagtcagaaacagtgacataaagatcacagaggtggcataaacagttggatggttgtgttaacactcaaaagcaacagcatccttttcccaaaatgtactttccctaagtgttgtgtgtatgcatgtgttagagaggatgataatcctctggtcaaaagtctgcaccttgaacagggttgcaggagcataaaaagggcgtccttcaggaactgaactgatcactcagaccactcagttttatgtaagacaagctgttttttgaaagacaaaaaaaaagggtgttatactcatagctgaggtgatcaactgttgtgacattctgtacctcctctttttccctatcattccgtatttttcaataaaatatttggattttttttaaagcccttttacaaatgtttgcaaaaagcaacaagttaggcagggaaggagtatcccccagatattcaataactttttcatatttctcacatacttgaaagcagagtttagaaagaacagtccttttgggaagaattcctggcaagaggattatttgaggttgccatatttctgctcctttcttagcaacattatttacaatccattcacgcctgtcccttcccccactggagtggagtcgttctcccttgtaatctgccctttgtgatctgttctctttcatgcagccagtgtgaatgggtatgctgcagtgcgcgctctgcccagagacgtggaaatgccaggagacccgaatactttagtggggcctttatttatgtcataaagcgctgacttcaagagcttgataatttgattaggacctttggtgaaaagttgtttcaagtggcccaagtgctataaatgactctcttttctgcactttcccgttaggttttaatttaaaagcacctccgcattagggggaggagagatgcctttggcagaggtagcagttggagactaatttgttagggcagccagtgttgaaatcatccttttcagttaaatctctctagtggaaatgatgccgagtgctttgtggcaaggactttttctttctcagtgttttccagtgccatttgtaacccacctaagcatgctctggagttgcctcccagccccaattttggctaattgtcctttgaggcactgcatgtcagaggtcagttctgaattccccaacttgagatttgaatgttccagggacagtcccaccgacttgcttccttttaagcaattagactacactcagctctctctggaatagtttcatcaagtgcctggggaacataaagaaattggatcaaagataaagcagatttaggaataaaaaggacctgggactacaaagagtggatggagtaggaccatgtttgcttgtcaggccatatgtgagtgcttttaagaagaataagaaaatttagagggaaaagttgacaacaatgaaagtagtgaggaaatattaaatgctcgatgttcatgtgtagtccatggtgtgattttcaatggtatgccaaatattttttaatattcgtgagaaaaaatatatacatatatatataaaaaactcctacatcaaatacaaagtcattctttcagagatattattgcttaggataatgctaaattagtccctagtcagccactgaattttaaaaaatatattaagtaaataatggtctagatattgtgcagatttggaaaaggatccaaaatatggtttagttgtgaataacaaaagtttagggaaaacactagtctggagcaaagtagatgtgtaagaaaaaagtgctgagttttttttgtttttgtttttgtttttgttttatgcagtctttatttctagtttgcctcaggtcctgctcttggatgttttcttaaggagttataatccttgtgaaagacacatgatgccaattgacacctcacgagttgtgtttggtggcctggaaatggattatgacagtttggattaattgggagctgtataatagcaagctgcagttatttttcaacctggacataaaaataaacaataaataattttgtgaagggacagcttaatgaatgacctgaagtttttaaactgagcttttgatacatgcgttgttacttactgtgactggccaaagactgtgtgcatgtttacctatgttttacattttatagccatgtataaccttcattattgaaagtccttgctttaaatgggcgtcattatgggatgtttgtggaatggagctgtcagaaggcatgaagtcatgcattccttgaagcatgcattggtatttctcataaggcccatccatgcagagtgcacactctgtttaaccttaactgagtctatctgaaagtgtgagtgagtttcatttaaagaaaaatatgtgggttttacttagaaaatctgcccaaaatttccacctttggatctgtaaactgaatttgagacttgatcttcattttattctacttgcagttcttcctgagtgtcttctgagttctgtgaggaaaatgagccagccttttatttgtaaaataactttagcttgaatgaatgttctttttgtttggtgtgaatttgctgatttttaaatgaattcttaaagttgctcccctgagctcctatcttagaagaggttgatatcttcctgaaatggcacgtaaaaatatgtatactaaatccttatcacactggagaagataacttacagtaaagagggtttgatttgttcttaagtgatttctacctcctttagaagtcaggaggtgttatttgtgagtacttttctgtctaaataaacaagcctgtagctggtatcagccaagctaacagggggcctctgtcttatgtgctgatgtgttcccagtacttggtccacagtaggctctgtgctgcaggctttgcaactcttgatcgtttaatccacagcagccctgcaaagtaggcttggcaactgaagacgctgccaacgaggatggagtgagctggttgcccagggtcacccaattagtaactggcagagcaaggatatgaacccacatatccctgactctaaagttcttgcccttttcaggtaatcttttaaaaagtgtttttatttgatttggattctattcaggctgattactcaacccatacatatcaagactgtgcccagcagtcctgagcctctgctgggaaggtgaccataaacaacctgagagtgactcgaagcatgcatattgtgttgtgtattggttggtgggtccagccttaccctattgagcaggtgtttgctgatggtcttttgtagagcatcctcacctggaaactgtgtaagttgattctttttagccaagctataaagacagccccaattggcacattctgtcacagttcactcttcaaactgatgcaggatttttcttcttggtcactctgcaaaccagggatgcccggccagtgatacgccctgcttgggcctccctcggccacgctgggtgtgccgcagcttgcctgtgttaaggttgtacctgcgtttggcagttcctgagctcttgaattgcacccaagaagaatgaggatacgtggaacattggagggtgagaagagtggagaagaattttattgagcaatgaaaacggctttcaagcagagagaggattcagggagaggggaataattcccccatgtggctggttctggggccctttatggactcagaatggggagtgcctgctgattggtttgtgagtatgcaaaaaagtttaaagggaaggcacaactcaaaggtgggcatgacagtgtagaaaaaccaatttggaaagggtaagtatatataaaaataggtgaagggtggggaccagttagaggaaagcatcccaaatgggaagacaaattcttaatccagtcctaggatttaacctgtagcttggttttcaggctttaaactgtcttcgacttggaggtggggtttcgtcggagaccctcccctgtctttctaggcatttgtctgcctctatcaaaaccatcttggatgctttaagaccctccaagcagggaattgctacactggctgacacacccatagctgatttttagcttagcaacttccaaaatggaaagatgaaatcgaaaacaatctggatttcccttaaacatattctggatcccaccctgaatataccaaaaaactgtcatcgatgacaaatgttcagcctatgcagacttgtacactaacaacctgattttgcccagcacttagggaagatgggcttcttactgatttatgccccagccctcacctttatccctgcccctccatcatgtattatgacttgctaataatgccatttcagagcaggcaagttgccttgtgctttcacccaggtgctggagtcagcctgcctgggattgcacccatctttgcctcttaagtaaccatgtgatgttggacaactgacttgagtcctttaaaagccttggcttcctcatctggaaagtgaggttaataatagtatctactttgttagaaagatggtcaggattgaatgagataatccatgtaaatcccgtagcatggtgcctggcatgtggtttctacacagtacacagtagcagctgttgttgatgttgttgttcttgaaggtgagatttctcatcagccagttgtttggattataaaagattagtaaaatgtttaataagttataagaaaagagccctgaataaagggtatgggaagggttgcagcttgtgagttaccatgagatggtggaaggaggttatctgaaattgaatgaaaaattgtagcatcagatgtgtttgggtgtggttaataatacacgtggtggtgaactgaggtagatggtagaagtttgagggtgtacattttgaatcttcccacatggctcatttcagccagttacagttttctgtgttcacctagtatttcttacagacaaaaatcatgaaaaagtaaatgcaaaatttcaacatgttcgaattgtttcttagtatatcggtggctttggaatgcattttcattctcaaaacaagctttatagcagaactgaagatatttaattcaggttctgtgggggtttcttagtagttagccacttgcatgatacccgttgagaatgggacaaattgatactatgctcaggaatgatagtatgccttgctttattttggcatgtgtaaaattgaaaccagaacaccaaatttttcttctttagaagtatgtatttgataaccaagtaaactgtattcattatagaaaaacaatacacaaatgttttaaaaaatagagccataatcctgggaataaccactttttaaaaagcttgacatatatccttctagattattttcgagtatgaatgttagcatttggagttacattttgttttgactgctttttagatttgtgccctaattttgacagttgctcactgtaaattatttttagttgttttcaaagcaatatttatgatataaaaagatctaattatttgctttgaactcctttttggtgtgtacctggatgttaatacttataactttaaaaaaatctcagcgtgaattcagaattataagcttagtattggttgcattctattttggaagacctatagagagctgtccaccctcctacaccactactaatatcctgtccttgccatgtgacgtactgaagccacaaggggaaagagccccatgaagctctgtctccctctcttctccccagcacaacacacacatacacacttaggcatgtttgtctttctttgtctctgctcttttcttgtgtctgtacttgtctgtcagtcggcctgtctctcccttactggagccattcatcatgccctcctcattcagggacagagtgtgctttctctgggctggtgccagatcctggagagaggagcgctttgaaaactcaacttggactcctcagcagaccacattgcagttgtgctcagcatctggccaccactttgtccacttaatatagggtccctaaccccacctataatttgcccacttctcttctgatctgggagcaaacacttttttagagctagatgcccagtttaaaatcctgtgaaaaataagagctcagtgaaaggataaggggagtccaactcaactacaataaatttggtttttccttcttgctttcttgtggggggaaagccagatgctgtccttttcacagagtaagttaccagtccgtgataattcagtagcatgacaagaatttgagctggcacttttcagccagaatctcagttacttacacacactacacacacacaatctgtttcaagttttaatgaatgaaaaattcacatgatagattgtcattcttagtttttaaatagtttttattgttattgaagtagaaaatagacttttttgggatattatcgatacatcagcagacttttaacttaagaagctttgaaccttgatttttctagtggaattccatattaagagttaataggcaagaaaagaagattttaaccaaagaaaacggggaggatggacagtgatgggaatggaaaattgaaaggacaagcttaaagttacagtcagttctgctatagcacaacatgcattcctaaaaaattactgcacaatgcaaaattacgcaacaaaaaccacatgaggcttattgggaaaacagggttatggcacaacactcaaagacctcatcagtgacacacacagaaaaacataggaacctaatgaaaagggtagcacagtcttacaaatgttaaatggtaaaaaaatacataaatactagaataaacatggcagttaccttgaaaagacctggcatttgcttgtggaaggcgtgggaagggttgcagcttgactgtgaagtcatggaaggaggttatctgaaattggatgaaaaactgtagcatcagctgtgtttgggtgtggttaataacacccatggtggtgaactgaggtagatggtggaagtttgaggggttgtgcattttgtgttttcctacgtggctcatttcagccaggtatagttttctgtgttcacctggtatttcttacagacaaaaatcatgaaaaagcgaatgcaaaatttcagtatgttcaaattgtttcttagtatatcggtggctttggaatgcatttgcattctcaaaacaagcttcatagcagaactgagggtatttaattcgattgagaattttatctaatcatttgatcttcaaagaaaatacatcacacatttgctctgagacacctgcttgagaattctgatacctagagtgtacttcttaaaagtcagagttctagttgagggttttctctgtcttcttcatatcacagacatgctgttcctttagtgcactgtttcagggggtacacaaggtgatttttgtagataaacacggatgaatattttaatgttcagtttatataataagcttattgaacttactgtttcacagatactattgttttggaaaaaaatctatctcagctgagggtagaggtgccctgcttcactctggggcccatctggaaatggattagggggtggtttcaggttgtctttggcagacgggcactactggtgaagaagcagtaggagagtaggaatgctaaccatcctgaaatcctgtatgaagaattgtcctgtctgaaataccaatgatgtccccatgagagactggctagtattagagtaaggaggaggagatgatagaattgataaagtaaattaaaatgttgagttttaaaaaaatagtattttatgtagctttggtaagaacgatgaaaatagtttgcagttgatgaaaatttggaaaacactaattcaagacaagtagtagtggtgagcttcatttgacaaaccctttagtgccttgtagcaggcagtattctcagtgccatgcacatgataacttactcagctgtggttaatggttcttgaggcattagcctggtctactgtagtgtctcaaccgtggctgcacagtagaatcagacagggaaacttgtcaaaaatctggatgcctagtccacaccccaaacgaattaactcagtctctgagggagggacctatgcatcagtgtttttaaagctccttacgttattccagtgggtagccaaggttgacagccactggtctagggccttccaaaatcactccttttcacaagaaaagctttactagtcatgcagaagttaattgaagacctctgtcccatgccttacagagaaagacaatggagacatggcccacagaagctgtatcgtctaaggcaggtgacaaaactgcaaacacatgtttacaatcctggctgacaagtgctgatgcttaaaagtatgttcagagtgtttgggatcataaaagagagaaaaactaaatttaaaaacatcttcagatgccaaatttggaaaactgccgaactgaatttattttagttttttattccttatacacagctttcattttggggtgaacaaaaagcaaaaggcacttataaatcactatcaatttaaccttcctaacttgattgtagcctttgtgtagttgagttggagaatagaaatttgaattttgtctgtagatagctaggataataattttgtcctgatgtggaacacacagttaagtactttataagccatcattgaagtaatgcccttccaggaataagtcaccacagttttaccaagaagctcaggactgctataagaagatctttggaaataaaccattgaagtcttacttgtggtcattgatcatcatgtgcttaatgttttaaatacttatatagctcctgtattgtgataaggcagtgttggatcacatgcattttaaaacttagagttaagcaaatgtgtaattttaaattaattaattaaaggcagccactaaggtactcaagcggataaagttaccaaatgatttacttgtttctgatggtaacattcttcaacagctcttgatttatattagtatggattaccttactctaagaaaacctgattctccagtggatagatttattttcagctaaacctttgtagtctgtacttaaccatgaattacttcctggtttaaaaaacaggcgtagctatttgtggtatttttgtcttgcgcctttggcatcttagcggtgtgaaccggagctatgccatctgtagtcaagtgagattattaaaaaagggggggtgggaagtgaaatgattcactggaaaatttcagcacagattcttagggaacgataagataaccctagaaacattcttatttggtgtcatctgctggtgggtagtgacagggaaaaaaaagaaggtacaacttgtttcttaagattttgctattttgaaaatcagagaggtgcggtgttagaaaggaagaaagaattgcttgcagtgtcatttagcagagctctgcagatgaatgaataattttcctctctcttaatgcaagttggagccaatgaggttcatttttagcacgcaaaacccaaaaggcaatattctcatgtttacgatggttgtctaatttcctgatgggtgtatgtgataaaactctttatgctgagatacttcagaaagagaaggacccgttcctagaatgctaagtaagtctgtggggcctagatgagccatttctgaagtctgctgagtttaacataccttcacttaacgacacgtgttttaacctgaatatattgatttcagggaattcttccagaattacatttgagattcgcctaaaacatgatgtctttttttctttgctttcgttttcagaaagaagacatagctcatccagcaagccgcctttggccgttcctcccacttcagtattttccttcttcccttctctgtccaaaagcaaaggaggcagtgcaagtggaagcaaccgttcttccagtggaggtgttcttagcgcatcctcatcaagttccaagttgttgaaatcacccaaagagaaactgcagctcagggggaacaccaggccaatgcatcccattcagcaaagtagagttccccatggtagaatgtgagtatggccaagagggtttttaaagcttacctgctggaaatgaaactgtgtacactagtggcatgtgagagtgcctgtgagtaatataaaagagagtctacttggggaagaattcaaatgtatgttgtattgtttcttgatgtttccctgtcatgtcataggaaacttttcagagtagtaatagcagtgataataaggttactaacatttattgatccattcttgtgtgctagctactgaaacctaactctatgtgtgtactatgtcacttatcacaacaaccctatggaataggtactgttactatcctcgttttccagatgaggagaaggaagcttcgtgaggtgggggagttttgtccaaaaaggcctcaagtcacataggcctggatttgtgtcccatttctgtcacttcttagctgtaggggtttgggcaaggcactgtttctgtctaagaataacagccactatgctgggttattgagaatattttagttaatatatgtctagcacctggcatagtgtctggccataggggacggttaacaaatggatactggcactcctgctactgctgctgtggataatagtaatgataaaaagatgcagagattcccagatgctgctgtagaatttttgggggtctacggagcaaatagggaagcagtgcttcctcccttcagccttaggttcacatcacagcagtgatgagggaagactgaaggaagttcacacctgccaggcatggctttggcaagtttccatggtcactcagtagattgacaggtttcttgaggtcacgtgagggagcagccacgcactccaataggaacatgcttcgccttgtcatggcatccctcagcctggtgacggatggcttttcttgggccagcctgcttttggagggtatagcacacatcgtaggtccaagatccggtaacctggttaatctcagggtagggtccagcacctgctgctgcataaggaccttgccagctgggagaggatgtgacatcttgcagtctctctactgctgtcaggctattccaggtacagttgtttggggctgtttgtcctggttgctaagcccccagcccctgttcttctgtcagaagtacagtacagcaagcttggtttttgttccgggagcagtctgaaagccacaaacggtgccagtgtagtgtgtaagtcactggccagcttaacagctgttagagcactgactccactgaacaaagtttatacaacctcattgattcaaatcttctttacttagagctaggcctttagataggaaccaggccagttgttagcttcctaccagtattttcagttttaccaagcaaaatgatagtgtcagtaagattccaagattcatatctttgttaatggcacaggtattccctaagctcctgtcatagaaacatttttcaaggactggagaattaccactttagtgacacaacatatatttattaaacactagtctcccttattgacagaagcaaagaacctcttcttggagatatgttatttagcatgtttgagttctcataagtctttagtgacatttattggaaatatttgctcactcagaagtttactttgttttgatgaatcctttcgtacaaatggcagtcctcaaaagatattctccaagggttctgcaaatagtctttgtttcttttagaccttctcatgttttgcttcttatagaaattgcattgcattgggtatcaggtctgagtttcccattgcctcatgtgtaaaattttttgaaatgatgaaagaccaggcaaatttgatggtccactgagggttttgcctcaccagaagggcttatagacttaatcagtatgaaccttactaacaaaactcataaggagccttccaagaggctggccctgtgcagcgcttgggtaggcccaggctctatcctcatccctctggctcaccattcacctgggggctgctgaggcactcaggcactggttttctcacttcctcctgtgacagcatgacaccctctgtgaaagtggaaaagattcatccgaaaatggatggcacactactgaaatctgcggtggggccaacctgtcctgctactgtgagttccttagtcaagcctggccttaactgcccctcaataccaaagccaaccttgccttcacctggacagattctgaatggcaaagggcttcctgcaccgcccactctggaaaagaaacctgaagacaattccaataataggaaatttttaaataagagattatcaggtaacttcaaattttctttcttcataatgcttctctatatattaaatgggcattcgtggggagcaaatcaactgcaatctagaattcctatttttaaaactggtcaacttcagctttaggaggaagttccttagttaatatgtttgttcttttcactcttgggttttaaagagcatgagtgtgtgtgtgtgtgtgtgtgtgtgtgtgtgtgtgtcatgtaaaagtagctttctagtggtgtatttctgaaggaagtaatacagacttaaacaatatcttttctaccatctgatggcagtagtcaccccctgtcttagtgatgttgctgctttgttgcagcactcacacgttgtatattttttattttattgataatgtggcttttattccagctataatttatctaactgttgatttcttctattttcttgcttaaaaaatacatggaggagagtttgtcaggccacatgtaatgcctgtgttcttttgacagaaagagagtttgatcctgacatccactgtggggttattgatctcgacaccaagaagccctgcacccggtctttgacatgcaaggtaggtggactcctgaaagtcaagtcgaccatcctgataaacatgggtgactgggatgtaccacactactcccacagtctctctaacccagagaagatgctctgtggattgttgtgaattgtgtaggtgaaggaataacttggttctgttgaagaaagcctcagattgacaaaatgtgaagtgcgttgttataaattataatcttgacagaggttttgtttctaatgagcagtgttgtatccacaggaatagtgttctctcccagtctgttatttttaaaaacttttaatatttccatataggctacccttgactgtgctttaaattatactggcttaaagcaagtgcagaaatttcccttgcgtgtgtatgaacatttaaaaaatgtgtcacccatggtcttaaattttaaagaaccactttttaaaaaatctgtgattttgaaatatccctgttttctagtttaaaaaaaaaatactgcaagccaggcatgcctgtaagtcccagctagtggggaggctgaggcagaaggattgcttgagcctaggagtttgagtccagcctggagaacattacgagacccatctcttttaagagaaaaaaaaaactagataaaatatattaataatttatatacaagctaagaaaatgtaatggtcttcctttttgctctggggtcttccttcttttaaaatgccagtatgctaataaggtatatttgctgaaaagtgtgggttattgatgtggggtggcttcaggtcatcagtgaacacctctacataaatgagcttgtatgttgatgtgcatttctctggagggtgtccccagctaccccccagataggttcaagaagcattcagagtcactgctttgaagtatgtaattttaaaaccttagagggaggaagtaaaaatgataaaagttagcattttcttctaaaaattaataaaattgttagtgttttactttaaattttattaaagtgtatttgaataaaggacttcaggccctgtcccatgccccagccagtggaggcatgttacagtcttctggagtgggaaatttttaagtggttcttactttaagcttctaatttaattttagtatatagattttgtcttacaacagtggttcagaacctttttggggaaaagggttggtcaagagtacctttaaatatctcatttttaaaaaaaaaaaaccacggtccatcttccgagaataaaatagtgcatacacatacacattctgaatttttctatcttggattaatggacacccccaccccaagcccatccttggatttctaggttaaaaactctcataaaacaaactgctttttttttgtatagggtactaattggacacacagtggtgtagtggtggtggtgtatgaagatagccacctgagttctgtagaattatgtcagtttcagctgtccctaagagaatgtgtgaaagcatgcctcagccctgtccacatcatgatcacaacttgccattctccttctgcgctcttcctgcctacctgactctcagtaacatggatttctcagtaatacagtacctgtgggcaatgaggtttgcttttttcaaacccaagatgttctttttcagtcatttacaaagcgtggcagggaaccacacctttaagtgtgcaagacagtattgttgactgtgaaagaatattatacagcagatgtctagaacttgttcatcttgctataactgaaactttatgctcattgattagtaactccttatttcgctctcccttcagccgctggcagccaccactctagttgttgattctgtgagtttgattatagatctcatataagtggaatcatgcggtgtttagtcattatgtgactgggttatttatcttagtataatgtcttcaagcttacctcatacttgttgtagcatattgcagaatttccttctttttaagggctgaatagtattccagtgtatgtatatactatgttgtcttcatccagtcacctgttgacagacatttatattgtttctacatcttgtctattataaataatacttcagtgaacataggagttctaatagctctttgagattctgatttcagttattttggataactacccagaagtgaggttgccaaaagttttttttcaactcaaaatcttcaaggagcttgactggcattcttcctgtgcctttattgctaggtggagtgactttgaatgggtctgcatttttctcacatcttccttttcaaatgatatatgctccccttgtcgtccttctttaagggtgtcattactctccgtggcattgggctaagcctgtcattgcattaataagtcttgagacccagcttgtcatgagatcagcatagaactggcagaaaatgcagcatccaccaggcctgcccttttacaggatgacttgactttttttcattgttttgtcagttcttttccttttccttgccttcacgttggtctgaatctattaagcttggtagggctaaacatgcctgcatgtccctaccctgagtgtttcccaagttgctgccaggtctcttctgtcttagacttagaacgttatctgttctcttcaccgtcaggggatttgctgctgttcattcccattactcattctctgttgtctgtctcccatcctcactgcccctcctcacttcttcatctgtctaatatcccgtcgaaagtcctctgtgccttccacgcggagagatttgtgactcctgtagcctttgtccattcactcattgtagaactttttattacgtacatctgtgagcacaggcctcactctttctaggtcgcagggaataaagggtttagcacaataaccacgtgttccctatgcttgtggtgcttacagtctaatgaaagagatggagagtattaatcaccaaaataactgtaaaattaccactgatgagttataaaaagatgagaggactacattatgaaagcctgcaaaaatgaagtttttccagggaaggctttcttgccataggaacattgggctgaaatcaatgtgatgatttatctgggcttgagagggatgggagaggtaggagaggtggaggaaacaatatgtgtgaaggctctgtgacaggggcagagcaaattccttagaaccttaaagccagccaggtggctgaacagaaagagggaagaagaggtacgcgggaccaaaggagcagggagcagtaagcaagggtcttagagtgtgcagggttccggagcctagttatgcagtcagtctttatcctgtgagccttgggcaacccctatcggatttctgtttggaatgttcttcacagctcagtggaaaccctacttaggcttcaaactgagctgggaaaatgtatctgcctgctttcttcatttggctgtactgtgctaggcaccgggaacattcaagctgaggagaggtttatacatctgcttggagagacaggcaggtggaccagtaatattatatgttcattcgttctttcaacacacgttggagggccattatttttataaactttttgtttgaagcatttgagcgtcaggtactcttctagatgctggtacaacacaaacaaaacaaagttcctggtctttaggttactttcttagggatattttccatattaaagaaaatcaagtaaaaatgtaaaaagctaaacacatttgtctgtgccaggttagattatttaggtagacatagtttgcagtgtgtctcgtaaggaggtgggttgtgttattcaaccgaaaatggtagttagaagcataattccctttttaagtccctaaagttgtaccaactatgccaatacatttgtattatgtgtaggggcatgcacacacacatttacaatattttgtaatataaaagaaggaaacgtgggtgaattcatttatgtttatggatatgtgattaggggccactgtagctcatgtaaactcatccactcctcaggattagcatctccttgcatttttacagactgagatctcagcagtatggaatggtcaggtttaacttgagtgattggactcaactgccaataagatttgcccaactctgaccagttcacacttgtacattcaactttatcttctgttagcaatagtattaggcttatttgttttgttttgttttaatgccagtaactatgaaatgcgtttggactacagacacattttcttatacgatttgcttcaaccacaggtgtgtgtattggttgccttaagacaaacactgccataatttgacttttctttttcctctgtgtatccatttcttaattctgaaattagacattgtctgaagacccaggggtgttgtccatcccatttccttaatttccatagccagtgtctatctatagggattactttgtctcccttcctgttcatagcatttcttctcagcctcatcttctgtccagtgctccttggctgtggcagtctgtctgcagaatgctttgggccactttctatttttgcatggcattttcattggaatagagggacgcaattgtgtttaatttttattctgtggaagttactaaaagaacactttctgatacatgttttatggaatgattgtttcttccctttacattaacattcaaaattttaaatggtccaaagagggtttttctaatggagtcaataagagcccccaaaaccaaattgctgttgtgtcacaaaacatgagtacttgttatatagcgctaatggttgctcttagttacataccaggtgtcaccgctcacatatcttttttcttctgatggaaataacatttccagattcttctgcatttagagcctagaacgtatgcttctagtctagctagggagaaaataatgggctcttaaggtttttagcttatcaaatgctgagtagcctttcactatgcttatggtctagattgcttatttattgggagtggtgttttgggatataaggcagaccaaaaattattaatgagattcctcagtttctgtatttttttggtccacagacacattccttaacccagcgcagggctgtccagggtagaagaaaacgatttgatgtgttattagccgagcacaaaaacaaaaccagggaaaaggaattgattcgccatccggactctcagcaaccaccgcagcctctcagggacccgcatcccgcccctcctagaacgtcacaggagccgcaccaaaaccctcacggagtgattccttccgaatcaaagccttttgtagctagtaaacctaaacctcacacccccagtcttccaaggtaagccaggccctccaactctttctcccaccttcagagatgagacttgcagatactgtaaaatttcagtatggtcatgctgttgagaaacatatctcaggctcactgtggagatagttttttaaggagttttactatgaaaaaaaaaaaggaaaggttgagttcagtaagtttcaaccagggctcctcttggttgtaaatgcaagcagcaaaataaagctagagttatctgctctatacttgctgaacatcaagtgtctcaactctgttgagcaggcagaaattgggtccttcctgcgggttagtgacaggaactcttcacatggctttggcagcagtttccctttcatttgtctttatatagcagtgggaattcttgctagggacaagccgtttagcctgagtttttacagcatccgtttatcaatgtgttttcattcattcatttggggctttggcccaagcatgtattagcactttagtagcagagtaaacagtggatcagagtgttttaatgagaacttatacacatacctcagagacagtgatggtggaatatgtgtgtgtttgtgcttacatactgaaccaagttgaagtaaagactgtacctagtttccagagggaagggaaagagaaaggcatagagaaagaggggcttcagtgttggccgttcatttattgggagcaagagcttctgctgaggaatgtgccagtcctcggctgctattgcttaccatttcaccctcacatgtctgatctttaaaatggttgcataaaggtggaagcatctccctcgtggaaacccaggtgcctgttagagcctgtcccaacgtgagctttgtggtttctgtgcagtatgctggaggagccatcagaggaggctcctcagagtgtggtcaggacctggccagagatttcctccccaagtcctttctttggtcatcttctcattgaagtttttgcatctagaaaaatgtaagcttaattccagagaccattgtaggtgtaggaaaaatacattactgcccttgagtaagaggctgtaggctatccacataaagtggtaataccaccttattcttgtatcacctcctgtctctcctaggttatcttagagcattttgcaaattacagtcagccctctgtatccatgggtttcacatccgtggtttacaccaattgcagattgaaactatttggggaaagaaaaattgtgtcgtactgaacatgtataggctttttttttttcttgtctcagtattccctaaacaatacattacatagcatttacattgtattaggtactaaaataatctagagattatttaaagtatacgggaggatgcgcataggttatatgcaaatactacaccattttatatcaggccactttgtacatttgtggatttgcagattttgctatccccaggaggtcctggcctcaattccccatggataccgagggacaactatgtttcatttattgtgtaggtaaaccaaatccagttgaaatttgaagaggaatcaaagaattctgttaaattccacatgtatttccccttctttgggggagaatagaagagggatctgaaccacccaaatggcaatagaaaggattcgttctaagttaccttgattgtatctggcaaacagctgaacttaacatcctgcagttcaggagagaggttcctttactcccaagccacctggatcagcatctgttttcccccagtgctagaggtggaacccaggcctctgctaggttgttttggacacactgttgtatctcagttaaggtggctgattcccaggtgtgtgatctgatccgtgctgcactttctactcaccaaggcctccaggctgccctgctcagcaaggtgggagtgcccccattgaccctcctccagtccatgaatctccacaccctcccctgcctgccactgagccagcttctcggttatccagtgaggagggcgaaggcgatgacaaagaagagtctgttgaaaaactggactgtcattattcaggtcatcatcctcagccagcatctgtaagttccacgtccacccccgcgttgaccctccccacacagcatggacagggcactgcaggggggcgcgccagggatcttggcatgcccgtatgtgtgggacgcggtcaaggtgtgagagaagttcaaaacagggtgccccagaggcagcacacactctgtacgggggacatctcgtgcttttttccctttctcttccatgacgctcagggctaggcattgtcactctcatgcttcacagcctccggtactcagaggcagttctgtctttcctgattagctcctttcctgaaggatctagaaccctgactgggcatgccagtgtgggagtcagcaagcacgcggctatgttttctcttgcagttttgcacatttgggagccggcagataggaagaggctattacgtgtttgactccaggtggaatcgacttcgctgcgccctcaacctcatggtggagaagcatctgaatgcacagctatggaagtgagtgcctgttgttcttgggagaggagctgactttacacagtgctgcattgtcttttatttcctgtgagactgatgttatgaagatatgcttatctaaacaaaactggcctttggccctgagaagaaggtgccttgtcattcattcattcatttacccctttaccccacaactacatattgttgtgggtgctggcattcaaagcagaaggactcccacatgtatggagctcacagtctagttgggattgggtaaggggagaaaaaaactagtctacagaagaataaggagatgatagcttgtcctaagtgacagaatggaaacaataacaatcagcaagacttagtgagagccaactatacaccaaacaacttaaatatacttaacattcacaattctctgtcaggtgaccatgattataccctccccccacccctggttttttttttgttttgtttttttaatagatgacaaaactgagatacagtgtcatgcagcaagttagtggtagggccaggaattgaacctagaggtaacatgttttcaagtaaagagctgaaaatacagaggccagagggattcagggaaagcctctctgaagaaagaggcagtccttgaactgagaaggatggatgagaaacagcagtcactgggacagtagggaggagtgggttctgggcagaaggaagcagctgtgtcaaggtcttgagtcagaaaagacagtttgttgaagaaatagcaagaaattgagcacagtacaaggatgaggtccaagaaaccagcaggggccaggtgacactgaaattgtttcagtgttgaaggttttaggtagaggagccatgtgctccagtttgcaatttaagacaccttgtgtgatattatgtacctaatgcttcccaaacaggattttaagtggaagaagagttccatggccaaaaaggtttaactcagcctttcctgtaaaaaaaaaaaaaggttctgttttttactgcagaacttgtcagagccttaatgggcactgtgctttgtaactcttgaagcagggaatgtcacgtcatgtataatgtggaacatgtcccaagctcttttcacctcggaaccttttttaggggaacatcttggagaactagtattcggtgggagtgactttggtgaatagtaagctttgctaaagtgactgtccagtaatccccaggccatcccagatcctctgtttgggcattatttactagtgcctccttaaatggactctgccagtacattcatttgactccctgccttggtttcctaataaagtcagacgctagtcggaggccttggattgtctgcaacccaaagaaccatctccatgatcattagcaggacttacatccgtttccttagaacaccagattcagagcactgttactctgcttttctttttcatatttctttctggttcttgctggataagaggttcttctttatgaaggaacattgtccctggctagacacagaatcaggggactgggtttgggggttctgcaggggtttttccacaccagaactccctaagatacatgaaatctcaacttcatatttcttcagactacccattgggagttggaaagcacactgagctcatgaaactatgggtttaatgtactcctaagagtttagaatggatttctgaatgttttatccacattatgttggtatgtggctcatgaccaacagtttgggcaaagatagtttcagttcctagtggcttgtatagtgagactttcctcttgatgtgaactttttaaaaagtaagatcataaggtcgactctgctgtctactctgttctgtctgaaggctgcctacttgcttccggggagaaggaaaccaaccctttccattagcatgaccattggtttttaaaaagtctacagcaacaagggacgtgttgctcagtaatgagctgacacataggcttggggcagaggggaacttggtgcatgttgcctcccaacataggagtgctggcggccttttcaggcagcccctgagattttctctggggagctcagcacttctcatccagagaactattctcacctggcatctttgaagccctcaaggaaactttcaaagtgatccaggtcccaccctaccggctcagcccaaaatccttccttacagggttattgtggtaaaattgaaggtaagtgaggtgggaattgagtatgaaatgagtaaacttcagtttgtggagtctcaggccagtggtgaaattagaccagcactttctctgcagcatggccataacctgaaaggccactgcccaccttctatgatttctgtgaactacttgtcctctgttgatttgggaccagtatcccatattccctaagaaggggctgggatggttttcaaagatttttgttggtgtattttttttttttttttttttttactttttgaaatggtaatacaatcactgggcttaaaaaaggaaaaccaaggctgaggcaggagaatggggtgaacccgggaggcagagcttgcagtgagccgagatcgcgccactgcactccagcctgggggtgacagagcgagactccgtctcaaaaaaaaaaaaagaaaaacgagtataaagaggcatacattgaaaaccgagtcctcctgtctcctacatgcttgttttccacctagcccccacagacatttttattattttttatgtatctctacatagtttatttatgcaaacacaagtcagtatgagtacatattgttactttgcctctttatacacaaaagagtaattaactacttaaaagagcttttctaagaggaacttgtgattgcctcccggagagatccacatccttccctgctctagaaggcttttcctttcctcgagatttggttccaggcagcctggtctttaggccctggcttcctgagccacctggtggtcatgagaagccactgctcccagtgagcagtagggcctggacttcatttagagcagggcttctgaatgctccagaatcacccaggggccttgttgccatgcagcttctgatgcatcattctagggtggggcccaggaactcagttttcctaaccaacctctcaggtaattaatgacactgcctgccaccctcctctatgagtagtgcggggagagagagcctagcctctcaatcttggctccacattagaatcccctggaaagatttagaaatgactgatgtctgtccccactccccgcagagacgctggtgtaatcgttatggatgtggcttaagctccacaggtgactgtaatgtgcaacagctggagttgagaagcactaacatcaggccagagctgtacccttgaatggggttttgggtttttttgtttgttttgttttgtttttgaaacagggcctcactcagtcaccgaggctggagtgcagtagtgtgatttcagctcactgtgacctccacctccccggttcaagcgattctcctgcctcagccttctaagtagctgggattacaggtgcacaccaccatgcccggctaatttttgtatttttagtagagatggggtttcaccatgttggccaggctggtctcaaactcctgacctcaagtgatccaccagcctcagcctcccaaagtgctgggattacagttgtgagccactgcgcctggccgaatgggatttttaaagcatttgcaaatacttgcagtcattaattcattttattaataacagtagtctttaaaagcatctggaaatcacctgggcagcagtctaggccagctctctcactggggtagtggccaggtcagccagggctaccccttaagtcaggatcaaggcaatcctggcacttgccttccagtcaggcctttttgtcttctgccacctcggtttaaattctgccaaagaagtttttgaaattttgttactgtcacatttaagattcagagctaaaataaaaggagaccctccctggtttgaatttagatggtttccgcatcccctaataaataccttgcccacacattcttaacagaatccattgttacaacaccatgctgaatatcccttgatactgtggggctttattcccttgttcaggccaatagttatgacctagcagttgctgttaattagctgcacccttccttttctctcattcattcctgacttctctcgacatttattcagtgccttctgtgtttcctgcactgtgctgaacactaggaccacaacggtaattaagctggggatgactctctctgcagaggatttggtgattagcaatccgacacttaaaggatgagcagaagctggggtattgggtcatggcattttctcagaatataaggaagtacagtggctggaagcagggaacgggggcgttgggggtgggaggtggagctagaggctggggcaatagcagcggggagttgcacacatacagttctgtaagaactgtaccaggaaggcattaaagaatttgaaggagagaggtgacaggattggctttgtagttcagagtgattgctttgatgtggatggtttctctttgtcacaagcaaagagggtggtgccatctgaaagtctctgtgaatggctgtggtcagtgtcattcactgtcctctaatttttttcaggaaaatcccaccagtgcccagtaccacctcacccatctccacacgtattcctcaccggacaaactctgtgccgacatcacaatgtggagtcagctatctggcagcagccaccgtctctacatccccagtcctgctctcatctacctgcatctccccaaatagcaaatcggtaccagctcatggaaccacactaaatgcacagcctgctgcttcaggggcgatggatcctgtgtgcagtatgcaatccagacaagtgtcctcttcatcctcatccccttccacgccctctggcctttcctcggttccttcctcccccatgtccaggaaacctcagaaattgaaatccagcaaatctttgaggcccaaggagtcttctggtaacagcactaactgtcaaaatgccagtagcagtaccagtggcggctcaggaaagaaacgcaaaaacagttccccactgttggttcactcttcctcctcctcttcctcctcctcctcttcttctcattccatggagtcttttaggaaaaactgtgtggctcactctgggcctccctacccctcaacggtaacatcttcccatagcatcggcctcaactgtgtgacgaataaagcaaatgcggtgaacgtccggcatgaccagtcagggaggggcccccccaccgggagccctgctgaatccatcaagaggatgagtgtgatggtgaacagcagtgattctactctttctcttgggccattcattcaccagtccaatgaactgcctgtcaactcccacggcagtttttcccactcacacactcctctagacaaactcataggaaagaaaagaaagtgctcacccagctcgagcagcatcaacaacagcagcagcaaacccacaaaggttgccaaagtgccagccgtgaacaatgtccacatgaaacacacaggcaccatcccaggggcacaaggactgatgaacagttccctccttcatcaggtaggaaatggactgtgagccccatgggaatgcccatttcttctcccttaagatcttttgtcagctcagaaatgtgtttggttgggttggttggttggtttgtaaacagatattcagcttcatggtgtcttcttaaaaaaaaaaaaaaaaaaaaaaaaggttcacggccgtatgaaggtaaaacaggctcttctgccagaatttctggtgcctttggaagatgttcttcagtaaagaaactacagtaatgcatttttagtagagctgcagaaagcatcggttgtgacagcaaaatcataattggagggtagcccctttatgaaatagccagtaatgtgttatcccagtgctgtgaagtgtgtgccattcgaggctttaaggaaggaagcaggcattgtttcctggatagtggttctttagtatgttccgctgaggaaagctgcgctaaaatcaaactgatctagaaaggggtgatttaagatttaaaatgaggctgggtgcagcggctcacgcctataatcccagcactttgggaagctgaagcaggtagatcacttgaggtcaggagttcaagaccagcctggccaacatggtaaaacccccgtctctactaaaaatacgaaaattagctgggtgtggtggtgcacgcctgtaatcccagctactcaggaggtggaggcaggagaactgcttgaacacgggaggcggaagttgcagtgagccaagatcgcgccactgcactccatccggcctatgagactatgtctcaaaaaaaaaagagcatttattatttttccctctcaaaagaatttcagatattctggttaaatctcaccccatattttctcttcccgtttttgagggaggcaggaaaacaggattcagtatgggcatagcagaagactgaaatctcattccaagctcatagttaaaaagaagtctgcatatgaacccatcagtagagaagtggctaagtggttgtgggattcataattaaccatgactttctctcttaggctgtatttttgtctcgtcccagctcttctgcctgttactgacctcacctgtagctgtttcttccagcttcctttgctctaacttccagctcatctctcatcttgttattttattcatcaggatatctcctcaccttgcttacgaacaggaatttcagcaacatcaccccagagccctgacttaaaatgtgaggctctttttcatgattttttttccccttcctcgtcttcagaacttaactcaaatgccagccgggttaggactttttcagaaaataccaagaagtttcttagtattttcgtagtgtgatataattttcctctaatatttgggtgaattaacacccattgccaaaggtatggggaaaatatttgtgaatttaactagctgcatgcattatgggttattatatgttgtttggcattctgatcatgggattcctggacaaatgagaagtgtgcttttccttcttggtttgtagttactcattacagtttataagcataacagtccaatataaacacagaagacatggtgtgccgattcttcaacgcaccgtctttgagagagacatgatccccacggaaggggcattccattgtgctgtaatgtccatctcacatctgtattagtgagcacactgtcttcatttagacaggagtgtagatcttaatgcccacaagtaacaaaaaggacagaaggggggggggccaggtggggcacagcagagattgacagtgcctactagaaattggggggacatggagcagctgcttccagacatttgttaccagttttaaagagaggctgcagatctggacttgcatgtgaaatttagttgagatatatgtgtgtgtgtatatatatatgtatacacacacgtatacacacacacttttttttctcttcttaaatctggtatagcctatgtatctgtgggccatctttggctcatgacctgccattttgccacctttgatttttaccatgtagtggcactatgtcttactagaacaacacagacagcctaactttgggctttttccttaaaatcagttaaaatcagtttccacttaagtttgtgtttgagagagattttctctgtgcagaggaatactttttattatgctacacaaatcctggggcaagagcaggggtgcttgcttagagatcaaaggatcattgaaccccaagaagtattgcacatttttatgtctttgttcatttatcgtatagctttcataagaatctcaaagggactcgtgaccccaaaatgctttaaagaatgctgctgttacaaaagtagggacctctacttgctgttccttgtggagctgccattaaaacaaaaataactgggctagttgaagttttctaaacaaggggatgaagagtgggacatgctgggaagcctaggagatgatggggttgggtaggcacccccaagagtctgttcatggcctgtgccaccaaagatgtaaaagcccactgtgaatgccagagtttcctcctccccagcatgggcactgccttgagtgcgaactgtcacacctgtgtgtgctagcccttgaccttgttcccttctcagttaacaacctggaataccttcaaggacacaaaagcactggaataccttcaaggacacaaaatcagtaaataaaaccaaaaggcaaacataagagccttttctctaagttagaaacccaggcctgcaactcttctagccagttggctagaagtgaatctttgcaatgattgtgcccagtagtagtgaaggcatttgaaagctaagaacaaaatctatagctgactgttcctggtgtcactcagtcaatggagactttagtagcgtgcagcctttggaatattcttgtttagaatcaatagagtgcagtgtacaaacgcttacttaccatttcattatttccccaccccctcttttttgaaagccaaaggcacgtccctgacagctgaaaatagcacggggaggaataatgcggacacttttgaggacaagttacacctccactcagcactctggactccacgatgcctttgagtctgttttcccaacctcctgtgggcctcaagggtagaaacctgccgggctgttgttttaacgaggatttccctgaagctatgtctctagcagtgagtactcataaaggacactggatcaagttcagccaccgaattgcttttatcagtgttaaagtggtctgaactgcttgctaccaatctgtgagaagtttttgtttttgttttgttttttaacttgcagtatatcacagagccactcttcaagtagattggctgggcaaaagaatgttttggcaagagcgttactgtagacctttctccctccttccttttactaccatttttttttaacactgtcatctgtaggtcactctccagcagttaggcaccttaactggagaccagaaaccttccagagaacacagggctgcatcccgagcaaccctctgaagaagggaattaggctttagattttgatagcaatgttccaggaatgaaatatagatgttagcccaagacaccatgacaaaatagcccagccttttgagagtaatttgggaaaagaagctgtcagaagtttctaacttacaaactggtttgaaatttttgatgcccagacagcaagtataaatcattttggaggcttacttttcatgatacaaaagcaattctgtgtgatttttttttttaagaagaaagaaaatgcaagctagttttgagaaaggaaggccaaattgggtcgggggagggtgggagtgaggaagttaaaatcactatagggagaaaaaacttttttcaagatttccaaagagatgaaattttcttaatccttttaagttttcatagtaaacagtatggcagattgggttggttgtcctacctggtctatttttaaaagtcaccttttaaagtgacattattagatacacttaaatgtttccaaggcactctctacattacccttgtttttctctttggatactgtcctgggactaagtgtagatttctgcttcaagcacttctggcattgtgtgtttttgtatgcactccccttcatgccacttcagatgtttatttggatgtggttggggacgagagcagacaccaaggaaagggagttggagagaatgtaagtcctgacctgaaggtcttttgtgatgcatgtataggattgccctgacacacaccctcctttcttgggattataccagccatcttcctgagagttttggagccctctaggatattttttctagtaccccaccccccacccctaaagaaagaccttaatatgttaaaacagcattgcttggagaaggtgtcattgaattccgggacgagccggagcctttaaatgggtgcttccaccactacaggctcctgacacgagtaacaggcactgttgcttagaagaacacacgaagttgccgaacacagggtaaaatttccaaggcgctgatcgttgccctggccagggcctgatgagagccagtcagtacattctttttttcctacagttcttgggtttcaaacttcagtttcagggaatttcaagtcaacaacaggtagaatgaataaacttggttaccagcctaataatgtgaattgctacagaattattcttattatgtaagaaaacaaaaactttatgcagatactttagctataaattgatgtaaaatactgatttttttaaaggaaggagagaacagtatcttgttcaattattatgcaatcaatcagtaaatgtttttaaaatgatactacaggagagcttagtaaggagagggcatggatgggccagtttggcatagttgggagaaatcagtctggtttccatcccagtcggggaagagagaggtgagagggaatcagaacgtacctagttgattccttggtgacaagtgcaatggggtatgggtagaatttattttcagagccaagaggacttgatggttataaataaagttgcctttagcaatggaatttacagatcgatcatgttgttccgaaagatgtgaataggatccacaataacaagttgattcagactaatgtagatatttagattagcaagtattgaacatttgatttcttagactgaggttttaaatgaatttcattatttctcccggtaatacacagagcatcgggattaggaaattagccattttggattctgtctgccacaaacagacctattctaaacagtgctattaaattttagactgttgttcaaatattttattttctcctaaactactttttatggtgatgaataattaagaccatttaaaacacgggagtacaagtatttttttgaattaaattaacttgcaaaaaccaaatttgcagtggttgggttgtttctagacagactttggtatcaatttaaaaccaagataatttttatattctttccaatagaatttcatgacaactcctgcagttttcttaacctacaaaaaaaaaaaaaaagtgctgcaatgatgaacaaagaattatacaaaacctacttttgtatctttattttggaatttcttgttctattataaatatggaagtatccctatttcagaagacatattttgttaaaaatgaattgtacatatttaaatatgtatttttgcacaggtctttttttctgatatcctgttttggtacaattgagatcatctagtatttatttattaattaataaaagtaaatacctttttataatttgaagtggttcactgccaagccaatagttctagaacctgcctcctttacagttttaagggatgcctctgttctgtgaaaagtctttgtcccttttagtgtctcgggagtggattcatacagatgaagtgggcattgcttcttcctggttgcctggtttcccgatagactacatgtaactaagtgacacactgcttttcttttgttagtattttatgtgtgggagtatgtgactgcgtgtgtgtgtgcctgtgcgtgtgtgtgtatactcagcacatgtatgttactatgtgatgtggtttaaaactaatggaaaaaactgaaagtgcctgaaactagttttaagcttagacagaatctctttaaaaagacttgaatgttcagttgaacttttggagtttgctttttccacctaaatattgtttctaaaattttaggggcggagttgaaaaccaccaatgctggtaattttataaggtattttaaaattaagacctcttggttcatagtaattcaattggtgatggattgcctggtggcaccaagggttacagatctttttgtcagccagcaacttacacgatgtgtccgttttgttattcactcatgaaatacaatttaaaatatttaaaatattttgtattccaaaaatataatacaaagaagtacctctgagaacattgaaaaaaatgtataatttgaaaaatgtaacttataagggcagctgtcttcctgcaagagttctgttgccaaggaatttcttaatgtcgctcattctgtccagggggtttggggcgattgggctttgaaaaaatattcttaaaagtttgtttagcagaaaataatcacttttacattttgtgcaaaacattttacattttcagataatttaaatgagcactacatactgtcagtgtgaatgtagggccttgaaagcattttgcttttttttttttttttttttttttgagcttggttataaaagcaatctcctgtgttaaaaacgtgtgaatagtttgataatttgtacacataatcaagagcatctcagctggactttgtgttggctgctgtatagaacatgaacaaatgtcaagggatagaaaattactttggatatttaaaagagaagaaatatatagtctatttgttttgtaacaagtttctgtaaataaaataatttatactatttataagaaaaggttgtgctttgctttataagaaattagcttgtggaacaaacatgttactaaacgggcaataaaattaggacttctcaataaataaggttggctgcatgaaatattgtacgtttctgcctcgttgtgatactaaaccctttcagtctactctgacttttcatcacttttggcatggaacacccttgtgaagccccttcaatttagccttcctcttatataagctaaatacttctaaggcctggggatgtttccatctgggggcacaaagctttgctttggataaattagtaactgtgtaaacagtgaacattactgtattctggccttgcatgtttgtgaaagaaacgagggagttgatggattgagaaacacattctatttgtacttaggtgcaaatttgatgacatgtagttttggtttaagataagctttttatccagacccggtctaatctcttcctttcttttacatacctcccttactggcaatacaagtgcattttagtattatttggaacacagcataatcatttacctctagaaatccagacatttttactgtttgcaaataaaccattctgataaattatttttgttgcttaaaataagaggaggaaccgctgtgtgttagcaagaatgtccatacctgatatgaaagagtcatgttggcttcagttcctactgccctgtggacttcccattccctccttacttgagtcaaccatccactcagtactttccacaaatctaataatgaggtgctctctgtaggtaaatcctttcactatggcttgtcctcaaacctcccaagaaaaggttcaactgctcaatctcttaacctttttaattccattcccttgcaggtatcccggccctgcataacaagatgatcccaactcaaggaaaggggtttagcagtgttggatcttggcgtatgtgggatttaaccaggcagaaaggcagacaagagtaagattctaggcagagagagcaaatgcgtcgagcatgggtatgaacatgtgagggatagagaataattctgcaggaagtttgctggatggaagggccttatagggttagaaaagctggtgtcagattgtcaaggactttgaatgtcatggggcttctcttccaggaacacatgggatcaggcttagattaacccaaatgtaattgtcagagcccagagatatttcatggtccagtcctagcactgtgcagctgccaaaagtcaaagccattcaaatctgtactgaaaactgtggaaaagcaaaggagcacttaagtctctttccccatgtcttgcattctcactctcttttgcttcaaagatctgtctttacctgcccctgtccccagtcctaacaaaaagcactcccctaaatcaactcttaagttcctctcccttctcactcctttcttagtctcctctttctgtaagaagttcttgctcctgttgttaatggaagttaattaaagtagtatttcaccttgtaaggctgtaattcttggcacttgttatcctcattttctacatccaaagaccatggaccagaatatctcttaggaggtaagggagagtgaggctatcagccaaagaaaaagtctccagggggaaggggagaatcacttataatttaatactttgtggaaaaaacatctctgccacctatggccctccaataacaatggaagacagaatcaacaggtgagaaccttgggacaaaaataagttacaaagctgttgtaatccaggtaagagctattaagtttccaaacgaaggctgactgtgaggataagtgatactgatttcagaaatct

SEQ ID NO: 111 - RNA, 7242 nt, Homo sapiens
  source 1..7242: mol_type = mRNA
gaaaaagggtgaaagagaaacttggcgacctcccggaggagttcgcgaagcgaccaggagcgtgttgccatcgtcctcacccggcacccaattccaccacagagtcgggatttcgtcggtgatcgtgatggggtgcttttatttttctctttgattttcaaaaaatgtctatgtgactgtccctatcttaaggggaagttgaaagtgggggcgggggtgctcaatgagaaacgttgccttgtgtgtagttgtttggagcacactgcaaattatattggcatctctttccaaaagtcactttgattcaacttcgatagctttctcgtaaatggcacgtttaggtggtgagaggtggatgaggaaacaggcaccagtgcagctgatttgacctccagtgggatagatacgattagcaccaggatcgtgtctcattttgaacccagatctgaacagaattaagacgaacgagctttcacaattgcagcagatgaagatccattggtaaattgatcaggatttttggcctaccctccaaagaaaaggagcggaaagaatgtcggagcgggccgcggatgacgtcaggggggagccgcgccgcgcggcggcggcggcgggcggagcagcggccgcggccgcccggcagcagcagcagcagcagcagcagcagcagccgccgcctccgcagccccagcggcagcagcacccgccaccgccgccacggcgcacacggccggaggacggcgggcccggcgccgcctccacctcggccgccgcaatggcgacggtcggggagcgcaggcctctgcccagtcctgaagtgatgctgggacagtcgtggaatctgtgggttgaggcttccaaacttcctgggaaggacgggacagaattggacgaaagtttcaaggagtttgggaaaaaccgcgaagtcatggggctctgtcgggaagacatgccaatatttggtttctgtccagcccatgatgatttctacttggtggtgtgtaacgactgtaatcaggttgtcaaaccgcaggcatttcaatcacattatgaaagaagacatagctcatccagcaagccgcctttggccgttcctcccacttcagtattttccttcttcccttctctgtccaaaagcaaaggaggcagtgcaagtggaagcaaccgttcttccagtggaggtgttcttagcgcatcctcatcaagttccaagttgttgaaatcacccaaagagaaactgcagctcagggggaacaccaggccaatgcatcccattcagcaaagtagagttccccatggtagaatcatgacaccctctgtgaaagtggaaaagattcatccgaaaatggatggcacactactgaaatctgcggtggggccaacctgtcctgctactgtgagttccttagtcaagcctggccttaactgcccctcaataccaaagccaaccttgccttcacctggacagattctgaatggcaaagggcttcctgcaccgcccactctggaaaagaaacctgaagacaattccaataataggaaatttttaaataagagattatcagaaagagagtttgatcctgacatccactgtggggttattgatctcgacaccaagaagccctgcacccggtctttgacatgcaagacacattccttaacccagcgcagggctgtccagggtagaagaaaacgatttgatgtgttattagccgagcacaaaaacaaaaccagggaaaaggaattgattcgccatccggactctcagcaaccaccgcagcctctcagggacccgcatcccgcccctcctagaacgtcacaggagccgcaccaaaaccctcacggagtgattccttccgaatcaaagccttttgtagctagtaaacctaaacctcacacccccagtcttccaaggcctccaggctgccctgctcagcaaggtgggagtgcccccattgaccctcctccagtccatgaatctccacaccctcccctgcctgccactgagccagcttctcggttatccagtgaggagggcgaaggcgatgacaaagaagagtctgttgaaaaactggactgtcattattcaggtcatcatcctcagccagcatctttttgcacatttgggagccggcagataggaagaggctattacgtgtttgactccaggtggaatcgacttcgctgcgccctcaacctcatggtggagaagcatctgaatgcacagctatggaagaaaatcccaccagtgcccagtaccacctcacccatctccacacgtattcctcaccggacaaactctgtgccgacatcacaatgtggagtcagctatctggcagcagccaccgtctctacatccccagtcctgctctcatctacctgcatctccccaaatagcaaatcggtaccagctcatggaaccacactaaatgcacagcctgctgcttcaggggcgatggatcctgtgtgcagtatgcaatccagacaagtgtcctcttcatcctcatccccttccacgccctctggcctttcctcggttccttcctcccccatgtccaggaaacctcagaaattgaaatccagcaaatctttgaggcccaaggagtcttctggtaacagcactaactgtcaaaatgccagtagcagtaccagtggcggctcaggaaagaaacgcaaaaacagttccccactgttggttcactcttcctcctcctcttcctcctcctcctcttcttctcattccatggagtcttttaggaaaaactgtgtggctcactctgggcctccctacccctcaacggtaacatcttcccatagcatcggcctcaactgtgtgacgaataaagcaaatgcggtgaacgtccggcatgaccagtcagggaggggcccccccaccgggagccctgctgaatccatcaagaggatgagtgtgatggtgaacagcagtgattctactctttctcttgggccattcattcaccagtccaatgaactgcctgtcaactcccacggcagtttttcccactcacacactcctctagacaaactcataggaaagaaaagaaagtgctcacccagctcgagcagcatcaacaacagcagcagcaaacccacaaaggttgccaaagtgccagccgtgaacaatgtccacatgaaacacacaggcaccatcccaggggcacaaggactgatgaacagttccctccttcatcagccaaaggcacgtccctgacagctgaaaatagcacggggaggaataatgcggacacttttgaggacaagttacacctccactcagcactctggactccacgatgcctttgagtctgttttcccaacctcctgtgggcctcaagggtagaaacctgccgggctgttgttttaacgaggatttccctgaagctatgtctctagcagtgagtactcataaaggacactggatcaagttcagccaccgaattgcttttatcagtgttaaagtggtctgaactgcttgctaccaatctgtgagaagtttttgtttttgttttgttttttaacttgcagtatatcacagagccactcttcaagtagattggctgggcaaaagaatgttttggcaagagcgttactgtagacctttctccctccttccttttactaccatttttttttaacactgtcatctgtaggtcactctccagcagttaggcaccttaactggagaccagaaaccttccagagaacacagggctgcatcccgagcaaccctctgaagaagggaattaggctttagattttgatagcaatgttccaggaatgaaatatagatgttagcccaagacaccatgacaaaatagcccagccttttgagagtaatttgggaaaagaagctgtcagaagtttctaacttacaaactggtttgaaatttttgatgcccagacagcaagtataaatcattttggaggcttacttttcatgatacaaaagcaattctgtgtgatttttttttttaagaagaaagaaaatgcaagctagttttgagaaaggaaggccaaattgggtcgggggagggtgggagtgaggaagttaaaatcactatagggagaaaaaacttttttcaagatttccaaagagatgaaattttcttaatccttttaagttttcatagtaaacagtatggcagattgggttggttgtcctacctggtctatttttaaaagtcaccttttaaagtgacattattagatacacttaaatgtttccaaggcactctctacattacccttgtttttctctttggatactgtcctgggactaagtgtagatttctgcttcaagcacttctggcattgtgtgtttttgtatgcactccccttcatgccacttcagatgtttatttggatgtggttggggacgagagcagacaccaaggaaagggagttggagagaatgtaagtcctgacctgaaggtcttttgtgatgcatgtataggattgccctgacacacaccctcctttcttgggattataccagccatcttcctgagagttttggagccctctaggatattttttctagtaccccaccccccacccctaaagaaagaccttaatatgttaaaacagcattgcttggagaaggtgtcattgaattccgggacgagccggagcctttaaatgggtgcttccaccactacaggctcctgacacgagtaacaggcactgttgcttagaagaacacacgaagttgccgaacacagggtaaaatttccaaggcgctgatcgttgccctggccagggcctgatgagagccagtcagtacattctttttttcctacagttcttgggtttcaaacttcagtttcagggaatttcaagtcaacaacaggtagaatgaataaacttggttaccagcctaataatgtgaattgctacagaattattcttattatgtaagaaaacaaaaactttatgcagatactttagctataaattgatgtaaaatactgatttttttaaaggaaggagagaacagtatcttgttcaattattatgcaatcaatcagtaaatgtttttaaaatgatactacaggagagcttagtaaggagagggcatggatgggccagtttggcatagttgggagaaatcagtctggtttccatcccagtcggggaagagagaggtgagagggaatcagaacgtacctagttgattccttggtgacaagtgcaatggggtatgggtagaatttattttcagagccaagaggacttgatggttataaataaagttgcctttagcaatggaatttacagatcgatcatgttgttccgaaagatgtgaataggatccacaataacaagttgattcagactaatgtagatatttagattagcaagtattgaacatttgatttcttagactgaggttttaaatgaatttcattatttctcccggtaatacacagagcatcgggattaggaaattagccattttggattctgtctgccacaaacagacctattctaaacagtgctattaaattttagactgttgttcaaatattttattttctcctaaactactttttatggtgatgaataattaagaccatttaaaacacgggagtacaagtatttttttgaattaaattaacttgcaaaaaccaaatttgcagtggttgggttgtttctagacagactttggtatcaatttaaaaccaagataatttttatattctttccaatagaatttcatgacaactcctgcagttttcttaacctacaaaaaaaaaaaaaaagtgctgcaatgatgaacaaagaattatacaaaacctacttttgtatctttattttggaatttcttgttctattataaatatggaagtatccctatttcagaagacatattttgttaaaaatgaattgtacatatttaaatatgtatttttgcacaggtctttttttctgatatcctgttttggtacaattgagatcatctagtatttatttattaattaataaaagtaaatacctttttataatttgaagtggttcactgccaagccaatagttctagaacctgcctcctttacagttttaagggatgcctctgttctgtgaaaagtctttgtcccttttagtgtctcgggagtggattcatacagatgaagtgggcattgcttcttcctggttgcctggtttcccgatagactacatgtaactaagtgacacactgcttttcttttgttagtattttatgtgtgggagtatgtgactgcgtgtgtgtgtgcctgtgcgtgtgtgtgtatactcagcacatgtatgttactatgtgatgtggtttaaaactaatggaaaaaactgaaagtgcctgaaactagttttaagcttagacagaatctctttaaaaagacttgaatgttcagttgaacttttggagtttgctttttccacctaaatattgtttctaaaattttaggggcggagttgaaaaccaccaatgctggtaattttataaggtattttaaaattaagacctcttggttcatagtaattcaattggtgatggattgcctggtggcaccaagggttacagatctttttgtcagccagcaacttacacgatgtgtccgttttgttattcactcatgaaatacaatttaaaatatttaaaatattttgtattccaaaaatataatacaaagaagtacctctgagaacattgaaaaaaatgtataatttgaaaaatgtaacttataagggcagctgtcttcctgcaagagttctgttgccaaggaatttcttaatgtcgctcattctgtccagggggtttggggcgattgggctttgaaaaaatattcttaaaagtttgtttagcagaaaataatcacttttacattttgtgcaaaacattttacattttcagataatttaaatgagcactacatactgtcagtgtgaatgtagggccttgaaagcattttgcttttttttttttttttttttttttgagcttggttataaaagcaatctcctgtgttaaaaacgtgtgaatagtttgataatttgtacacataatcaagagcatctcagctggactttgtgttggctgctgtatagaacatgaacaaatgtcaagggatagaaaattactttggatatttaaaagagaagaaatatatagtctatttgttttgtaacaagtttctgtaaataaaataatttatactatttataagaaaaaaaaaaaaaaaaaaa

SEQ ID NO: 112 - DNA, 306000 bp, Homo sapiens
  source 1..306000: mol_type = genomic DNA
acctaaggctattcctagagacatgcattcttatctgcaccaaaggtacctgaggcagtaatgtttaatagccccaactggaaaaaaaacagatacccatcaacaagatgatggataaacaaattgtggcatattctcttgatgaaatactatacagcagtgaaagtgaatgaatcacagccatgtgtgacaacaaacaggtgaatttttctaaaattcgaaacagattaggatgtatgaatcttgttttttttgtttgtttgtttttgttttgttttgttttgtttgacagagtctcactttgttgcccaggctggagggcagtggtttgatcttggctcactgcaacatcctggactcaagggatcttcccatctcagcctcctaagtagctgggactaggttcacatcaccatgcctggttaatttttattttaaaaaaggtttttggagagacagggtcttgctatattgcccaggcttgtctcaaacccctggcctcaagcaatcctcatgctctgcctcccaaagtgctgggattacaggcgcagacaccgtgccctgccagatgaatcttaaagacataatgttgaaccgaagaaacaagaaactgtagaatatatactatatgattattccatttatataaaagcccaaaagaagcaaagtaaaattgtattggttaggaacgcataataaggtagtcaaactttttttaaaaaagcaagatatgaataccataaagtcaggtagcgattattgctggaataaggggctgtgtaagcgtgttggcaaagggggttctgcagaggtggtgatgttccatttctagccctagacttgatttcatgagtgttcatttcagaccaatttcttaactccgtacctttatgttttatgcatttttctttgtgcttattgaatttcaccacacaaaaagcagaatgggaagtaatcaaagtggttctggagagacgtgagtatcaagcaaactataccacccagaacccctatccagccaactaggacctggttaattatttcctcctgggagttcagacttgtcacctctggggtctccaaggtagaataaacctttaattccaacttgcaggagtccttgtgatttgaaacgttcacagaagtaaccccaaaccactctctccactttcaaaaatggtcttttgctaaacagagcaaatttgtttagagactgacgaatcgcacctctagacacaaatccccttctcttttctgtcttttaagtttttttcctgcctccatcctgccttctccttgcaagatgctggggagcgtccggctgtctgcaaccgaaatggaacggggtggaaaacaggctttcctcccaggggaggaggaagcaccccaattcccccctccctgcctcccaaccatgcgacgctcccctctctcccccacaaactccgctgagcccggtacccccgcgcctccacgagcctccacgattggtcgcgggccctcatgtgtcgacactctgggtgggtccttctactgttaaactcatcaattgctccccttttccgtttgctggccagtggttcagacctttgcgcccatttttttttcctctttaccttcttctacccgcaaccctccacaccagtcttattttagcaaaacctagagaaggaggaggtggagggatttggagggtggagaggcattgccgcatccaggggcagctattgagtggctaagcggagggcgcatacctctctctctctctcttttccccctgttgggaattttcaggatttcactgctgcaatttaaccccaagatgaggcaccattgagcgaaacgctgtgcgcacatacacactcacacttcctccgggagcagaagaggcagccgttggtgattcaggaagaaaaaaaatttttttttttttttttaaacctggaccctgcggtgtgaagactccttaggaaccctctggagcgtcttactccccttccctcctctttcccttccctttcatcttctttgtttttattttattttatttttggagctacagatctttcagcatttttaaggtctaggaactccagcaaaacagaagggcacttaattttttttttttttttttttgccctccccacccagacctgggtttcgtctttctttatttttaaatatatatatatttttttattttttattttttatttttttttaatgggccgagcgcactccttttgcaagatgccagcctgacccggacctcggaggaatttgaagcttccactgcgtcccggggggggcgtcctttgcaaaccgttcgcgtcttaaagggggtgtgcgttgggtggattttttttttttaactgtctctttttttttttttccggagtgggtggactggggattgcctggattccttcctcggttattttttgcctcgcttctctctcccctcccccctcctccccgggcccccgcgccccgcccccgcaccctcctcccgcccctccttctccggggtcagccaggaagatgtcccgagctgctatccccggctcggcccgggcagccgccttctgagcccccgacccgaggcgccgagccgccgccgcccgatgggctgggccgtggagcgtctccgcagtcgtagctccagccgccgcgctcccagccccggcagcctcagcatcagcggcggcggcggcggcggcggcgtcttccgcatcgttcgccgcagcgtaacccggagccctttgctctttgcagaatggcccgcttcggagacgagatgccggcccgctacgggggaggaggctccggggcagccgccggggtggtcgtgggcagcggaggcgggcgaggagccgggggcagccggcagggcgggcagcccggggcgcaaaggatgtacaagcagtcaatggcgcagagagcgcggaccatggcactctacaaccccatccccgtccgacagaactgcctcacggttaaccggtctctcttcctcttcagcgaagacaacgtggtgagaaaatacgccaaaaagatcaccgaatggccatatccttttgcccgaaccccagcagcagctgcgcctccccctcctccctccgcctcccctcttccaggctgggagagagacccgggggttgatgggaggtggggaggaggggggtcttccaggggctgggagagggggcaccgggaggagtgtgaaagaatctctccaccccgagctgggttgagctaccctggaggcttgggaatgggtttgtggggggctggggggtgggcagcggagagtggatccttcccaaggaccgactctagaatgagatctggggcctggggtcgtgcaggagccttggtgggggctttcgagccaagtccggagggtttggagttctacggagtgagcttggagcgggctcgggcctgggcgcttctggccagggcaggggaactatgggggccttggttgggttttcttggccgtcgctcactggagtccacgcaggggaagctggacagcctctccactactgctttccccaaggtggggggccgccgcacttttagggcagggcgcttgggggctcccagggctaagagcaagagggagtccatgtggccttcacactgagaagccagcactggccgaagtgagtaccccagggtgggccgctgttcctatctggagaggatagtgatgggctggggggcgcttatgtttccctcatgtgtgcaggtcccattgcctttaaccgctgattggggaacctcatcatctttgggggtgtcgagaaagagatcccacttgctttatctgggcccctggcctgggaagacctgatctggacactttcagtaagaaagacagggcaacagcaaatgaggtggtgggtccattttagagcaccatgtccagcttttcctaccccgagtagccgagagggaacaccaggagaatcagcacccatgtggacatcttaggtaggtaaatgccttttaaatttttttttttttaatcaaagatccagaggaaaaaggtgaagcccacattttcttctgtggagatgctatcaaaatgcagatcttctgtgtttctttaaatccctgcctgcttgaaataaaccttgaggagggcttaacatctatcgagatgtaggcaggcaagggtgggtaattagtcgggctttctagcagttatctaagcatgacccagattccaggaggggggacacaccctgctgcccaggctggctggccactgtgccatgcccagatgtgccgcttctccgcacagttccaaccagctgccctctgtgtaaaaatgaacgggctggatgggtccctggggctcagcgatgagtcccctatcccttttgtatgtggttttgcagttatagactaaacggggctgggccctgtgtggtctccgggggttgctgtttgaggagcatggcgggtggtagagggactcacttcaggggggttcaaaatcgagcctggcgcttggatcctgggtgctgggattgcaacagagggcactgaggttttggagtgtgtgagtggtctactttgagggtggggaaaattaagaagttcagcagaggtgcttttgaggggagcatacctctaactacgatgccatctccgttggtgcccaaagcaggtgccaggtctttgcttcctaagtttcagactcttaaagaggctggttcttaaggttagcaattcctcaccatcccaggcccattgaagtgctcaggggtggcttgattactctgcctatcaacagagtgaggagtgggagtgccttgcaggaggacagggtattcatgggtgcacacccagttagctccaggagtgagagggctttgctcggctgacaggtttcctcattgaaaatggctttagatcgccttctggagcctggatttggagacttctaagaggaaaggaaggaggtggggagcccttctgctgtgtccttagcttacctctgtccagcctgaatcctgcagattggagggctgttgggggagagggggattgcagtggcccctcggaagggggaatcgtgggagagggaggcaggtgaattgcgagtgttgcttgccacttcatctattctctggccagctcgcccggggctttcttgctcttatgatgagtttgtgcattatgctctctgcagactgtttttgttctctttgacccgaggtaacaaacacattatacagccctactctggaagggaaaactccccacctcacaatctgtcatcgagctgggtcatccaggactgagctttctctgtcctggatggagcggagggcggtggcggggtgggtgggagggttggagatgagaggggatggacagagacctggggagggaggtagtgaataaaagaattcaggccagtgtaaagagaaagacacgtggaatgtcagagtcacgataccagggcagaacattctactttttaatctaaatatttctgccattaaaaaaaaatgtttcagcatatcctgagagtgaaaaaaaaagtgtgtaggtacttaaataaagtctaatatatgtacaggcaagtacatatattcagatgcatagatttttacaaaatgaacacacccacgtatccagcacccaggtcccgatcagtgccctggaagtccccctccccataccgcctcctagttgctcccccaacaagggtaccgctcacctgacttctaaggttcattttgcctcttttaaacatgtaaatggagtcacacagtacgttcttttgccactggcttcttttgctcacatctgtgtatgtgactctactacaatctatccattctactgttgatgggcatttgtgtcatttctgtttgtgccactgggaacattcttgtgtcttctattatttttttcccacagttctcttagataggagtggaatcgcccctgctactttttgatgcatgtgttgtgggatgtgtatttggaaatggtgttgactaagggttgcaggtcgatatggaaagcaggttcctccctgtcttgtttaagagaagtgagtgaatgatccatgaacttgtcggtatgctcacagggcctaagagtgctacttccaaatgtaaattctggcatggtacactggtgaaggatgcagtcttgctttctccacactcggggcaatttgtcactatgatttcttcctctttcatccctcagtgggtcaaacttgaagccatcaatgacaattaagaatcctcatttatttcattttttcccctcttcctaagtgaggaaacccaaatggaagtctttgatgttcaaatttacattgccgtgtttttctcatgccaggcagcaagccgtcttgaccacacaccttggtttcatgttttcattgactggaattgtgattcaaatagggccatgagggtctctgatgattgccgaagagctcagatctgtcagctcaaaaaggagcatctgtcagccttcctagagttccctccccacttaatgccactcactccttctaccaagtgccaaggtgaatgtcatctttccagccctccctgtgccaccaggtctcccactgaacatgatgtagaaactcaggccatcggaggaacactggaagcaggtcagtgtattatcacgcacagttgcctgaattacacgtagaattccagcttttcatccggtttgcagaaatcttaacaagacacctaaagtcacattgacatcaggtgacatcactttgacatctgtggacattggctgattggcactcctctcatttttttttttttttttttttttaagaaaagctctctaaagagaaactttctgcatgagaagcgctgggagacatgggagcaggttatcagactcttggcctgtcctgagagatagaatgttctagaaggtactgccgtagagggcaggatggtgtcacttacgtgatccttgtactagaccggcttggctggtatttccagaggagcaaaattctgcgaagtaaaatttagcacggcttttccaatgggagtattttcaaaaagggtgcaatttcttatccacaattccccaatccaaaaagctccaaaaaccaaaagacgagctcatatagaggtaaaacctaacctgaactgacttcagtttgaagtcttaatttacagttttcattcattctacttggtgtgcatttgagtatgttttgcagcagaaatgttagatgtgcttgatgatgaggtgctgcttcagctcctgactgttaggtctgcattgtagtcctgtcaaactttcaggtgtatggaagttgtcttgttaacaggatggttctggtccagcaggatttgggtggggtctgggattctgcttttctagctagcttctagggattccccatgtggtaagttcatgggctagggttggagtatccaggttagatcatagagacatcttgttatcatttttcttttccttaaaaatcaggtttataggggccgggtctggtggttcacgcctataatcccagcactttgggaggctgaggccggtggatcatgaggtcaggagttcgagaccagcctggccaacatggtgaaaccccgtctctactaaaaatacaaaaattagccaggcgtggtattgtgcgtctataatcccagctactcgggaggctggcaggagaatcatttgaacctgggaggcagaggttgcagtgagccgagattgcaccactgtacttttttttgagactctgtctcaaaaaaaaaatagatttattgatgtataatttatttgtagcaaaattcacccttttgacatactggtctgcaagctttgacaaatggatgtagttgtggccaccacccaaatcaagatatgggacagtttcatcaaccctaaaatacccccacagtgcccctcttgagtcagcaccccacttctccagccccttcaaccactgatctgttctccatccctacagctttgccttttgccgaaggtcatataaatgtaatttcacagtatatagccttttgaatgtggattcttttactcagactttgagattcattcatgctgttgcctgtgacagtagcgccttcctttttggtgttgagcaggattccatgatatggatggaccagagtttgcttcccagccgaaggacattgggatgcttccagtttcaatgattatgaatagagctgctataaacattggcttatgggttttagtgggaacatttcatttcatacatttcatttctcttgggtaaattaacccaggagtgagattgctgagttgtgtggtaggtgtatgtttaattttataagaggctctcaaactgttttcctaagtggttgtaccattttacattcccatctttgcaatgcgtctaaaagccctgagttctgaattccaaagcacgtctggcctcgatggcttaggattaaggatgtggatctatggaaaggagtggaagtaatagtgttaaatcccggtcagagaaataagaaagattaaggatgtcattcaaagctatgtgcctgcactagagagagagaaagaaggggttctcttgggtggggttccacccctccctggtagttctaccattccccaggaaaaagtcaagctctgaggctgtgagacccatgatctttaccctgttcttcaccactgcaaccccagtgtgtgggacaaagcaggcgtcctataaacgtttgctgagcaaatgagaaaaggtacctgtcttcacccattaactaaattgtataacatctatctgatctacccttgtgccaacgttttaggattttgatgggttttagttgcagggggttgagagactgtccatgagattatcagaccaatgaaagtttctgaaatgttagtgcttgagtagattggatgcagcggccccttgagaatgaagtctttcttcagggacttggagtgggaggcatctgttgggtgcgtagggcttatgcttccccctccctgtttcccccccagtagcaagcacacatatacactttctcagcaataaaaagcaccgccgggaaggtggactccatccagaaatgatcagagcctaagagccgtgcagtaacgcatttccgagaatgccagctcagctcctgagaaaagggccggatgggatggtgcctgctctgaaagagggcagagaggagagggaaaacactccggactctgggtcagactggcccaggttcacattattcaccagccatgttatcttgggcaccagagcctatttcttgacatgcatgatgaggatattccttctagtagcatctcccttggagggctctcaggagattaaatggggtcgtgcgtgaaaaatggccagcacagtctccagcacagagaaaaaccccaaaacgccagagccgtaatactatggagtcatttaggttccagtgttctttttttggaaaccggccagaaaagaggctttctgggtgggaatgggagcgaagtgcccccccccaccaccccctgcgactggtcagtgtggattgattaacctgatcgtggcgctctttaaagccacctttggacattttgcattctccgttctctctggaagctttcaggggaaaaaaaattcgtggccacttgacccatttttctattcccttgagtctaaggtaaaaattaattctctttcctcctttggtccctccctctctctgtgggtgacaaggtgagggagttttaaagtatataattagcttccctcttccccttttgcactccctgtctcttcctttggggccggtcgagagtgcagcccaggatggccaccccaggtgtccactgcaaactccacagaaaaactttgctcaacttttggtttagaatttaggtacccccctccccttccaaactttggtcttctttctcctcactccctaaaaaaataggaaaaacaaggaacattcctggcgagggaaccatgagtgggcacagcaacttaggtttcaaaaaccactgggcctcagttcttatctgagtagggtgacccttcagccagggttgcctgggactatcctgggtttagcatctctggaaactcacagtcctgggcaaactgggacgctggtcaccctaatggtgagttcttaacacctgagagagaagaatggtgcaagagatggtgccgttgaccaagaaagggggagagtcagttacttattccctctgaaaagccaagactttttattggaatgaatgcagcttttagaagccgtctttaaggcagctaatacaagagagattccagctatgaagggaaatgcctgagttaagtccggatcaagttttgacatctcgcttcggtcagacacggctttatctgccgttcagactgggagcagccgtgagtcttccttaaaggtgcctgttgctcaggcggcacctgcagttagaaattagcagcctcccacccccagcccccaaataacaggattcaagagtcccctctctgaagccatgagggaaacccaacttagtcacccacttgccagtaaataatattcatgctgttaagttctgttctcattttaggcctatgtgtaaaaaatatatgtaattttaaactgatttttaaagtattttcatacgaacagcatttgcaggagggcgaagtctggatgttacctttttgtaaaagtggatggatttgtcttcaatgagactctggggcagacttaaaacttggcccgcagtggtgttacatggattctgatcttccagagtctgtcacgttcttttatctccatgatctttattatcttctttattgagaatgatgggcatggtgtgtgtgggtgggagggctatgctgaccatcactgcagtgaaatgtgttcgtggcatgttgtggcgtctgcataggaatgtgtctgtttgattaacagcacaagcagtggaggctgtaaggaggaaaagaggagggaaggtgatattggatggaggggagacatatagagcttgggaacagtccaccctggctgcaaatctcagctccagctcacagttgtggagcctcagtcttctcctctgtaaaacggggacagtagtcctatgtccgaggaattgtaagaaggttaaaagatactgtacccagaaagcacatggcatatataatcatcctgtgaagtagccaactcaatgaattttattttatttattttgagtcagagtctcactctgtcacccaggctggagtgcagtggcatgatcatggctcactatagcctcgacctcctaggctcaagcgatcctcctgccttagcctcccgagaagctgggactataggcatgcaccaccgtacccagctttaacaacataaatttatatatatatatatatatatatatatatatatatatatatatatatatatatatatattttttttttttttttttttttttttttttttttgagatggagtttcattcttgttgcccaggctggagtgcaatggcgcgatctcggctcactgcaacctccgcctcccgggttcaagcaggacgatgggcatttgggatgtttctagtttggggtgggggattgtttgtttgtttgctgttatgaacaatgctgctgtaaggaatcaataattttgaatgaatgaattcgaggtgttaattttagtctgtgtacttggaaatctagcttcacctagaatcagctgagattcatcagcatttatggcaggagctaagacatttcacagcttactcatcattttctctaagaggctgggtcaaccggttagctcttggtcctgcttgtattctgagagtcagaacctgtggtttagacactggcaattgatatggttgtagagaagcagcatggttgagttgagagcatggattctggagctaggtggctggggttcaaatcccagctctactagtcactggctgcgtgatcttgggcaagtcacttaagtgttctgtgcttcagtttcccagtctgtcccagtggtgattctaatagctccatggggatcctaatagctcctatctgggaggattaaatgagttaatacatctgatgtttagagtggtgcctgacacttaggaagcactatatgtgtttatacatggaagagtggatagatggatggacttatgtgggtggccatatttgggcttctctgatccactgctgagaatagtgtgtggcacacagtaggtgctgcataagtgttaatattctgctctttcttgccaagtctctcaactcccttgatctctgttatttttggcgtctgtgttgttaacccattcttctgaatgatcagctgaatcactgttgctccaatatataagccaaggagaacacaatcacaaggtctcattgattgtccatactagaattccatgattcctaggcccaagtaggattttccccacgtctcagcaatccttcttccatgtttctaatctttttctctcatttgttatgccccattgccagactctccaatctccccacagcttccccttcctctaactatactgtctctagtcttaccttctccctaagggcaccgtctttgaagacatcaaatacttcagagcaccaaatataggttagcttctctgagggccttacaaggacatggagtgtttgggtcttacacaaattggaatggtcagaaatgtttagagacttgagttgtctttgaaagagttgtcagaatgcaaatttttgacttgtggcctgtttctgatcacaacgcagtcttttaagttatggatcatagctggatgtttgtggtttagaggggatggaggcatcctctgcagttagtgttggatgtctgggtggatggatggatggatggatggatggatggatggatggatggatggttgaacagatgcatggatgagtggatggatggatggatgggatgaaggaaggaaggaaggatgggtgattggagggtaggtgggtggataagtagattggtagatgactcgatgggtgggtggacaaatggatgggtgaatggatgactggatggatgactggatggattggtgtatgagtgaatatatggctggatgaataaataggcagatgactagactggattgaggggtaaaaatatggatgactggatgggtggatgagtggatgatagatggttgaatgggtgggtggatgggtggatgttggatataagggtgtatggtagggtagctgtctatgtgtgggtctccctgatatttggtgttctgtttgacttgggaatgaccaagtctctccgcttaccaccttatttgtaccttttccagtatcaagtgaattttgcacacttttgtaaaaatcaataagattgtatgtttaggactttgggaggccgaggcaggcagatcacaaggtcaggagatagagaccatcctggctaacagggtgaagccccatctctactaaaaatacaaaaaattagccaggcgtggtggcgggcacctgtagtcccagctacctgggaggctgaggcaggagaatggcatgaacccgggaggtggagcttgcagtgagccaagatcatgccactgcactccagcttgggcgacagaacgagactccatctcaaaataaataaataaataaatattatatgcttaggttttacctatgtaattagaaagctccttgagggtaggggacagtgatttgccttcctcacatccccccaaagttcctgcactatatcatgcataagtatttaattgagtaatggtgaggaaagtaaacagtgttattgaacaaagattattaaaattctggaaacacctggttttgtttcagcactgggactgaaagtggaattccttggattttgctccattggtggataggatagcatgtggtggtggactggtagactctttctcttccaagcagattgggtaaatgccccagattcttacccactagtcagagattacagattactgattgatatggtttttctctgtgtccccacccaaatctcatctcaaattgtaatacccacatgtcatgggagggacctggtgaaggtgactggatcatgggggtgatttcccccatgctgttcttgtgatagtgagttctcatgagatctgatggttttaaacttgtgtgggcctctttcctctctctcctctcctgctgccatgtaagacgtgccttgctttccctttgccttctgccatgatttgtaagtttcctgaggcgtccccagccatgcagaactgtgagtcaattgaacctcttttctttataaattacttttatagcagtgtgaaaacggactaacacactgatgtagcaaggtcctttaaggccccatgtgatctggtccctgttttgtctttgatctcatctctttcattgtctaccttcctttcattgtctattctgtctcagccctgctgaccattttactcacacccatgtcatttgcattacatgacattccttctgttcagcataagctatttcctctgcctgcatcactgtttctccaggtctccccatggctaactccttctcttcatttaggtctcagcccaaaagttacctcctccaagaggcctatccttttcatttactgaacatctcatgtacaaaaaagaatataaaatatatgtatactctctcatccacaaaaaaatctctgaagacattttaatgtatttcatcccatacctttttatgcatgtaaacttttaggaacacatttccatgccactaggtatccttgaaaaaataagggccaccatgtatagttgcacaggttgtgcactgcacaaagatagcatgtcacatatcttaagtatcatggagcttgtatgtctactatttcagtaccccagctgataaaagcttaagtatcttgttctagcaagatgaagctattatgacaatttttgacagagaaaggggtgttttgtttaagttcacaatcagagaaatgggtgtcttgtttaatttcacaaccagagaaaggggtgtcttgtttaaattcatacagtggtgctgtatgggttggtggcaaccccagaaaagactgttgttaatatctgataatgttccactttatacgtgtattatattcatgtaacaatctctggctgtttgttttgccattataaataacagtgcagtaaacatctttgtgtgtgaatctctgtccaaggttctgatagttttctgaatgaaattcctgtctatatatggcactccaagcccataattgaaactctgctgttaccactttctttgaatctgtagaaggaattttgagaacaggtgactggtatattcaggatgttgatgacaaggaacagagaaagaacagttaaatggtttggaatttttcctgggctgcatgtaaagcagtgcttttgaactgggagcaatttttcccccaaggggacttttggcaatgtctggagacgtttttggttgtcacgaatgtagggggagggggcaagatgctactggcatctggctggtagaaaccagggatgcagttcagcatcttaaaatgcacaggacagcctttctcagtaaagaattatccagctccaaatgtcagtaataccaaggttgagaaatcttgatgtaatcgatgtcatgggtttcttcaagaggagtgggtggatttagggtttttgggtgacttaaatttaatttacagtttgtcttcctagctgggtgtctaagccagctttctgtgaactttagatcccacacaagaagcaacaggcttgctaccgacagattcgttgatgtaaatatagatgagtgtatagaaggaaatctcacccagagctggaaaatgttggaatgaaaactgcggcggcctccccttctctctccttccccttctgttgccctgtttgaaaatcgtgccttactttctttggtctcctggcatggtgaatgctgctggtatggactgtgtttctatatccccttgatccccacacccttaggaacgtacaggagagagaccctggagcatatcagcttagagatggaggggaatgggaaggagtgcgttcattcattcataaatgttgactgagcacctactgtatgctaggtgaatgggaggacgtgagggcagggaggtgacaaggttggcttattctgggctttgtgaactatggtgaggattttgtttttttccaaaggaaatggaataaccactccttttttccccccgatatacctaaactttttgattttcataacaaaaatgggcttccttttgtatatttgttttgagaccagccgtttttccaccaacactgatcacactgcagtgagcatcctggtagagaagtctttgcacacttctgtcactgtttccctaggacagattcctggaaatggtatggcaaggttgtatgtcaggcttttgggccaggttgcaagaaacaggaagtctgtgccctttcaaattccaaggtcccctttccctgacgacgtggcccaatcaggcttgccctcccttgattttacatcttcaccaatcagataagtgaaagtgaaatcctgttgtggtatcctgtgcatttctttggtgacttaagacatagagcattttccagatctctgtgggctgtttggatatcctttcctctgttttctcaggcacattctttaccgatgtctttgagggattgagcaagtttctgttgaaattgaggcatgtcatggctctgtgtggggcttgaggcagtccagtgtagtggagggagggaggctgtggagcctggctgcctaggttcaaataccaactctgcttatttccattcatatcattttaggcaaatcacttagccccctgggcctgcctttcctcatcagtaaaagtggtataacattagtgcctgcattgtggggtggttgtgaggaaagcagcactcaaaacagtacctgacacacagtgggtgccaaataagagtctgatgtattagtgttataggtatcggcctcctccctccccagtgcaatagtgtgtgtgcgcctctgtgtacctctgttggtgctgacaagccctttttaaaatttagaggtgaggtctcactctgtcccctaggctggagcacagtggtgcaatcatggctcactgcagcctcaaccgcctgggctcaagcaatcctcccagcttagcctcctgagtagttgggactatcggtgtgcaccaccacacctggcccttagacagcccctttatttcaaagcgaaatggcagccacaagatttagtgcaagctctccaagctttaggaccagctgcaactcctctaactgaccaaacaggatcccccatgtccccaacccccaaaacctgatgaaaagcaaacagaccattttccacattcatgacggaaaggcccttttcttggctcctgcccttgctcatgtcaggatttcactccatccctgataaagaggaagcaccatgtcccaggaggacatggaaactctctgctttgtggtgaatagttacagtaacagtagctcctctctgtggggagcttatgagcccctaagctttatagaactgccctggcagtttatgagaacttcatcccagcccccagagctcatggcacttatttttgcccccagtttgcagatgtgcacactgagactcagagagctaacactgcttgccaaggtcacacatctagcaaatggagaaactttatgagacaggtgaaggcacagcaaggataaaaacccagagggaaaaatactcaagttttctccgggaaaccatttgcattccagagaggttggtgtgcgagtgggcaagagatgtcgcgggacgatggttaagggacagagtctgagctcaactaggactaggtttcttcctttccttccttccttcctttcttccttccttcttcctttcctttgtctttctctccctcccttccttcttcctttccttcctttcctttctctttccctccctccctcccttccttcttccttccttactcctttccttccttcctcctttccttcctttcctttctctttccctccttccctccctcccttcttccttcctttctttccttccttcctttttcctttctctttcctttctttcctttccttccttcctctcttcttccttcttttctttctttcttttctctttctttctttctttctttctttctttctttctttctttcctttctttctctctctctctctttctttccttctttctccttccttccttccttcttttcttttcttttcctttcttttcttttgttttttgagatggagtctcgctctgttgcccaggctggagtgcaatggcacaatctcagctcactgcaacctctgcctcccggttcaagcaattttcctgccttggcctcccaagtggctgggactacaggcacgcgccaccacacccagctaatttttgcatttttagtagagatggagtttcaccatgttggccaagctggtctcgacctcttgacctcgtgatcctcctgcctcagcctcccaaagtgctggcattacaggcgtgagctaccacgcctgggctaggactaggtttctatcggtggtgtggcttttgggaagctacctaatcttaaccactctgtttcgtcatctataagataagcagtgtagcattttcttgcaggaatgttgcaaggattaagtggatggtgactgtaaaacatcatgcgtggcacatagtaaattctcagcaggtagtcattgctggtcatttacttttctctaatgaccagcaagctcttaatttcctccttggcatgggcactgggacgtagatggacaaaacacagagagaaataaacacacggacaaaaatccccgccctggtgtggctgatattctgggtggggagagagagggagtccaaggaccagataaacaggtaaaggatagtttgagtgtggtaagtactaaggctcaaaaataaagatctcccaggtgatcttagctgcatttggaggtgacaggagatacaactgagaaactgagataggaggaaacccaaggggagatgtgggcttgatttagggtgatctgaggagtaggagaagtcaggggctggtgtggggaggctctgatggttctctctggggagtgaagcagggattcgttggggagacccaaggggacaggtgaaggcccctgaacaggtggccagtgctgagaaaggaaaggtggaggacccaagtgagttcctaatttcttcattgctcccctaaggtgtttgtctcacccttggccatagtcttggatcacttacagatgcagaccaggctgggctcaatggcttgtgcctgtaatcccagcactttgagaggctgaacccaggagtttgagagcaggctgggcaacatggtgaaaccccgtctctacaaaaaaatacaaaaattggccgagggtgttggcacatgcctgtagtcccagctacttgggaggctgaggtaggaggatctcttgagcccgggagacctatgctgccaaataaggtaggcagtagccacacatggctattgcaattttagaaattaattacaggccacatgtggtggctcacacctgtaatcccaacactttgggaggccgaggcgggcagatcatgaggtcaggagatcgagatcatcctggccaacatggtgaaaccccatctctactaaaaatacaaaaattagctgggcatggtggtgcacacccgcagtcccagctactcgggagactgaggcaggagaattgcttgaacccaggaggcagaggctgcagtgagctgagattgcaccactgcactccagcctgggcaacagagagagactccgtctcaaaaaaaaaaaaaaaaaaaaaaaaaagaaaagaaaagaaattaattacaataaaaacagtccctgagtttcactggccacatttgaagtgcccgatgaccctgtgtggcttagtgaccactgtgctgaatagtgcagatctagagcatcctactggacatgttgccagggtccctgaaccaacagaattagcatctcctgggagcttgttggaaatgcagaatctcatcccctaccccagacctgctcaatcccaatctgctcttcagtgagattcctcaggtgatcttgactgcaccttctaatcacttggaagctttaaaaatgctgaggctgggcacggtggctcacgtgtgtaatcccagcactttaagaggccaaggcgggtggatcacctgaggtcagaagtttgagaccagcctggccaacatggtgaaactccatctctactaaaaattacaaaaattacccaggtgtggtggcacacacctgtagtcccagctacttgggaggctgaggcaggagaactgcttgaacctgggaggtggaggttgcagtaagctgagatggcactgctgcactccagcctgggtgacagagtgggactctgtctcaaaaaaaaaaaaaaaaaaaaaaaaaagaaaagaaaaaggaaaatgctgatgccccaagctccacccccacagatgctggagagatttgtccagggcttcccctggagtggggaatgtttgaaaactccccaagggtttctaaagttcagccagagttagcagaaagcccattaggtggctaagcaggtagactgaagttggagctgtgtgaccttgggcaagccacttaccctctctgaaccacaagctcccttctctctaaaactagagacctgctggcacctccctcccagggctgtgagaagtaaatgatgggatgattcaaagtgctgagtagggtcagatgcagtggctcacacctataatcctagcactttgggacgctgaaatgggaggattgcttgaagccaggagtttgagaccagcctgggcaacatttaaacattacccaggtgtagtggtgcatgcctgtagtcctagctgcttgggaggccgaggtggggggatcccttgagcccaggagttcaaggctgcagtgaacaatgatggtgccactgcactccagcctgggggacaagagtgagaccctatttctaaaaaagaaagaaacccaaaatgctgagcgagtgccttggattgatagtaagcagtgcctgtgtaataagcatgaattttaaaaaatgaggtcagcagccttagagctaatggttaatgggtttgggtgtgggatttttttttttttaatttttaaaacattgagataaaattcccataacataaaattgaccattaaccattttaaagtgtacagtttggtggcatttaatacactcagtgttgtgcaaccatcacctctctgtagttcaaagaccccaaaaaggagaccccgtactcactgagcgctcactccctgtctctccccgctcccccagcccctggcaactactaatcttctgtctgtatagattgacctattctgattttgggggtttttgaactcgccttccctggctgacaacctctcgccatccaggtgagactgtgtgaaagcccagctccctgcatttctgggtcttcctctccccactgggggctgcccccacctgtttccccctctgggcaccctggttctactcatcagcctggcttaatcccagcagcaggtccatgttctgctctcctgtggctgccacaaatgagaggtttcatctcagctgggtttctcctagttaaatatttaataaataagacctacaacttgtgatgctgggagtgtttgatagtgaaattaatgatggggagagagtggcaggcggcccacaggtccatgctggagctgggatgaggcgccctgggcaggcgtccgtgccactgatgcttgggaaccacggtgggccatgccatcccatttcccccagccagggcctcttttttagcactgtgtccagcacagggtagccacctgataaataagtgttaaaagaaagagaggctgcgtgtgtagggaagaaggaagagacagaggagacaaagaggagacacagagagagagagagagatgagagagaaagaaaagtggaaggtgagaaagagacagagatggaaggggagagaaggacctggatggaggaagtgcaaggaaggcaatggtgagggaaaagagagagagacaaagatggaagggatgaaggagagggagagatatggaggtagagaaagagagacagaaagaagagagagaatattgcttcttgtatcttccccttctcctgttatccttgaccatcttattatttttttcttttttctgtctctccagttctcatttccttaccctcgccgtcttgccaactcgtcatctcttttcatttcctgtgtctatgttatcttttaattttctgtctgggtattttccccttttctctttctcagcataaactgttggttggtgtatgtgtcttctttcttttttagtctttaactgacgtgtgtgtgtatgtgtgtgtgtgagagagagagagacagacagacagagagagagagagagagacagaacaaacctagagagcagtgtaggaacatagatgaacattttaaagaccaaaccatgaagcgtacacccattttacccaggtcaagagccacagggccaccatcagattctccctcatgctcatcctcaatcacagccactccttccctcctggaggaaccactattggagattgtatgggaaccattcgcttgctttcttgtgtggttgtaccacctaagtacgcatcctgaagcaatatagtcagatattatgtggttttgagttttatatgaataaaatcatgtgagaggagttgttttgtattttgcttcattggtttgcagttacctttgtgagatttcatcctcattgtggtcactgcagctccttcatgatcttgtttattcattgatgatgagcatgtgactttgttctcttttgggcactggcataagcagctttgttggttgtttatggattctgctgctcgcttgcaggggtctctctggagcacatcgctctgtgtgaaattgttggatactaagatttgtacattttcaccttgactaaacactgccaaacaattttccaaagtgcttgtgctaatttacactcctgccggtggtgggtgagcattcaagatgcttcacaaccttgccaacacttggtattgtcaggtttttaagttatagcctttctcatggtgatttctcattgtgattttagtttgcatcccccgattgcaaattagagtgaacatagtttaaaatatttattgactattcaagcttgcttttttgtgaagtgcctctacatgctctgtccatttttgattaggtcacttttaaaaaaaaaatattgatttgtgggtgatccttacatagcctggaaactgattcttcatcattatatgttgtgcaatattttctcttggcttggcttttgatcttttttataatgtcttttgatcaccaacagttcttaattttgatgtggttgattttagaaatcttttcctttatagtttgtgggctttgtatcttatttaagaaaatcatttctaccctgaggccatggatatattttatgttatttctgaaagttttacagttgtgttcactgtatgtctttaatcagcttgggattgatttttatatgtggtggtaggtaggggtccaatttcctttttattccataagaattgtcccagcatcatttattaaaaagcccattcttgccccaatgatctgcaagacaacctcttgactgtttaacttttaccttctttcatctggtctgtttttatactcaacctttgaagccacaaatatttattgagtgccaactgtgtgccaggcactgagttacagtgacggatatgacagatgcaatcatggctttcatggagtttacagtctggcaaggatgacatgtaaatagttattactacttataatttaaaatgttataggccttgcaaaaagggacaagtctggcttgctctaaaagaaacatgtgaaacaacatcttccagggaagtgctgataaactgagtctttagtgggcctctgctattgtaggggtgggaatggtggaaaagatgttttggccacagggaacagcatgtgcaaaggtcctgtggaaggtgcttaggagtttgatatttatcctaaaggcactgtcaggctactgaagcagtaatacaatgattttatgtctgtgaatagttccactggttgctgcatggagaatgtattggaatacagcaagaataaaaagccatgagaccaattaggaaatgatttcactcattcagggaagtgtgccttgggctggcatggtggctgtggagatggaaatcattgatcagattaaaagaaattttgagctggcatgatttttcccctctctcccctctctctatctctgtttcttttctggttgtgttttctgggtgagaaaagcagtttgtgatcctgccaagggtatgtgctctggaggatgtatttgccacagatggtctttggaattctggccaagagagtcactggacagcccctggcccccagggtttctggagccaattcaacaatgactgtttattaacaacagcaaggatgagttgctagcctttccttcagagcaccttttaactgttaccttactttgttacccaaaccgacactatggaattggtgggggagaagtggaagggtttttatctccattttttatagaacgggggaagttaattggcactcttgaaatcatacaaaagatgttggtttcaggattggtttctggactttcagcccaatcccaattactcaagctcacacacccaatccccaaacatactcttttgcaaataatttccctactgaggtgctcctggccaatttaaaaggtccccatttccttgcctataaaatgggaattaaagtaaaaatatctacctgttgacttgctgtgaggtcagtgggcctgacacatggtgtggactcattatatttacctatgtgaatcccttagttccctttacttggaagaggtggaaaactcaaaggggcttaaacaagaagtggggattgtattggctcatgagactgaagagtctcaggagtgtccagcttcaggcttgtttggatctagggatcagataacaccattaggcctctgtttctgtttcttggctctactttttgcagctggctccattatccatgacttagctgcacttccagccctccagtctgcccaagaccatattcagagagagattcttctctctttttcagctatcttcccggaattttcagcaaatgctttcttgcttttgattggctgttgctgaggtcgtgtgctcatgccagaaccaatcactgtggggaaatgggaggtggagaacggggtgctctgattggcttaggcttgggtcacatgactttatggagttggggtggagccaacttctccaagtggggaagagcagtcttcttaaaggtgtattaggatatgcttgctgctgtaacaagcaacccccaagtctgcagtagcttaaggcaatacgaatgtacttctcactcaccctaaatccaatcagataatcagcaagtggcattccatgtggtgatttcaggacccggctctttccatctgtggctccaccatcccctaagatcagaaagtccttcacttccggcctgtaggaaaagagtatgaaggctcacacaggaagttttgggaggccacatatagaagtagtgaaccttacttctgcctgcattctgtggactggaatttcatcccatggtgtatgagagagggtcccagtaggaaacggaagacacagaccaagaatcaaattaagagatagcttaagaatcaaattaagagatagcttacaaaggtgtgggcccttactgaaatagagaaggaggaagagaggaaggaggcagagacagagagagactgagactcacaaagacacacacacacacacacacacacacacacacacacacacacacacaagttgagagaaagaaggggggagagaaagagagagagggagcatttcctaacaggaagctggcagaataaatgtcccccattgtccaaagccagagggctgggagcccagtgagcccatccacacaggtcagccccccatgtgacagtcctagaagggtaaagaaggaaggagagtggatttggggtaatggaagacagccaatacccatggtccatctgactgcagggggaactgagaaattcagtccatggagaagaaggtttagtggacacgtcactttgtctttttcacaaagtgaaactaggttctcaggtggaaaaaagaaaaagaaggtttgccttgctgctattctttttttttttttgagacggagtctcactctgtcacccaagcgggagtgcagtggcacgatctcggctcactggaagctctgcctcctgggttcacgccattctcctgcctcagcctcccgagtagctgggactacaggcacccaccaccacgcccggctagtttttttgtattttagtagagacggggtttcactgctagccaggatggtctcgatctcctgacctcgtgatccgcccgcctcagcctcccaaaatgctgggattacagacgtgagccaccgcacccggcctccttactgctattcttattattggtggtagcagtggtggtgatggttattggttcttagttccctctacatgccagtatctgctctcttctttttttctcccttacttctttccttgttctgcaaattctttccctttaagtgaaaatctttccgtgttctccaagggagataaattctatgccaagcttgagtgtggggtcctctgcttggatagctgtcttctccaggagatgaggtagaactgagatagtgggggtctctgcaggcagtctgtgcccctggcaagcccctcaccttaacctgaggctgggtggggaaagatgccttgatggagtcagaacagaaagcaagtgatcgctgcctgaaccaagcagtcactttcctggaggtgaaacctagaaacggtccctcaggctgggtccagggaggtggacttgggtcccaggggcaggaagcaacctgcccctcacctgctcctacctctttgtagcctatcttggcaaccagaagtaggtatacaagtgacgttgaagctgggcatgttaacaatggtgtgagcccgcctgactccaatctggtccagctgtactggccgtgcatcctcatctccagcccccagggtcagcccagcggctgtaacaatggtctgtcccctccccgccccacccacttctttgaactcctccaaggatctgtgatgatagggctgtcactgtcttagcttccaccattcaagcttaaccggccttcttcccctccatggagaacggaagagcaacccctcattgcctctggcagctgaccagcaggtccctgccttctgcccactcccaggtctaggacaatgaggtgagaggtagacaggaccaagttccccagtgctgtcttctaggtccacctatcatgagagccgtgattcctagtttttatcaccctctccccaactttgccagctctccacttctggcagtggtggctgcccatgacttcaccttcccgtgcctcagtttcctcatctgtaaaataaggacagccatggtaatgagagttctggtcaatatgccaggcacctcgcttgcatcaatttagctcatcctttcagtgccctgaggggtgggtactgttatcatcccgtgtaacaaaaagagaaaaccgaaacagagagagagactcactatctgaggtcttgcacccctcaagcaacaaaagtgggatttcagcctaggctatctagattcggagtccacggtctcaatgaataataacaacaataataatattgtcctaatctgatgagtttttgatcagattcaatacaagagcataggcagaaaagcttagcccagtgcccagcacatggtaagaactcagcatgttatttataatagtaataaaccattttatgttatgtaattatatattcatagataaatatagttgactcttgaacaacataggggttggggcaatgacctcctgtgcagtcaaaaatgtgtgtgtaactttttttctctattttttagaaattttaaaattagagacaaggtctcgcttttgttgctcaggttgatctcgaactcctgggctcaagtgatcctcctgcctcagcctctcaaagtgctaggattacaggtgtgagcccccgcacccagcctgtgtataacttctgactcccccaaagcttaactactaacagtctattcttgaccagaagccttaccagtaacataaacagtcgatgaagacagattttatatgttatatgcattatatactgtattcttacaataaagtaagctagggaggagaaagtattattttaagaaaatcataaggaagagaaaatatatttactattcattaattggaaagggatcattataaaggtcttcatcctcattgtcttcacattaagtaggctgaagaagaggaggagttggtcttgttgtctcaggggtggcagaggtggaggtggaaggggaggccagaaagacaagcacgcttggtgtaactgttattggaaacaaatctacataagtggacccataaaattcaaacctgagttgttcaggggtcaactatatatgctacaaatacgtaatatgctaatatagttgtatgttattgttatagtacggggatcagaaaatgttttctgcaaaggattagctagaaaatgtctagtaaatactgtctctttgggaccactctactctgccattatagcaaaggcagctacaggcaatacgtaaatgaatgggcatggccatttgccaataaaactttgtttacacaaacaagccatgggccagagtttgtcaacggctggtatagtatatgttattatatattagctttactttttctgttgctttgtttatgttcttctttgcccttcctttcttaaaggccagcctttctttctctctgttggtctgtcttttaggacagcatggcaggccactgggacatgggctctcctgactccaggcttgtttgtctgataagacatgaagagtgaaggtggcaggactctgagctcaggcctgtcctcctcctcttccctctcttcgttttttctttcctctttcctcttttcttcccaagctccagaagttgccattttcctttcccattgctgattttctctgccttgggagaaagcccgagaagatcacttggaaaagcccacgagcatctctggcctcactcacccagctcctgccattgtctttactcttcctcagacacaccaggcacagtcctacctcagggcctttgcactggctgtttcctctgtctgcattgttcttctctcaggtgacctcatggcttctccctcctctccttcaggacttcactcaaaggccaccttctcagcatttgcctcccgcccttctgccttattttcccctttggaacttttcaccttcttacttactcatctgtctgctatctgtcaccctacatcactatgatctccacaagggaaggtgattttattcgttttttgttctgttttgttgaagatgaggttttgctcttgttacccaggctggagtgtggtggcacgatctgggctcactgcaacctccacctcccggattcaagtgagtctcctgcctcagcctcctgagtagctgggattacaggcacccaccaccatgcctggctaatttttgtatttttagtacagatggggtttcaccatgttggccaggctgatctcaaactcctgacctcaggtgatccacccacctcagccttccaaagtgctgggattactgtgagccaccacacctgatcttttggttttacccaccaatgtggactagaacagcctagatcagcaggtggcatgcagtaagcagttgataaatatgtgttggatgagtgagcactgtggcttctgtcattctgttgctcaatagcattcatctggaaataaccacagtttgtttatccatttacctgttgattggcatttctgttgattctcgtttgggccattatgaacaaagctgctgtgaaatacttatacctttgcccaattcttcacttggtgaacccttataaatcctttaggccaggtgtggtagctcacgcttgtaaccccagcactttgggaagccgaggtaggaggatcgctggaggccaggagttcaaaaccagcctgggtaacatagcaagacccgtctctacaaaaaaataaaaaattggctggacgtggcaatgcatgcctgtagttccagctacttaggaggctgaggtgggaagagtgcctgagcccaggagttcaagaccgcagtgagtgatcgcgtcctgcactccaggctgggcgatagagtgagaccctgtctgtaaaaatgacagcaacaacaacaataataaaacctttaggtttcctcttaaaaggaacatccttagagcttttcctgacccagcaactcaccccaagtctgaattagacttcaccccatttctttcataacatttatcacaatgacatgtttattttgtgggggcgggtggcattctggccagaactgtcgacttccagagtgaaaatacggaagaaccaaataaaacacaacacacacatttgcacagcagctcgagggaggtgcttagttctttgagtttccaagaacagagagacgaagatttgtctggggaggaaaaatcagggactgcttcttggaggaggtggactgttgctgccccatccacccacacatttgcagatgtggtgatgagaagatgactgtcacgaggtctctgagcccagggggcccatggttgagtgcaaagatagtggggttgacaaataatcgtcgtataacaaaagaaaagccaccacagttgcataatggaaaggcggcttctatagaacattcagatcatagttgaaggcatgtcacactgtgttactcagaggccactgtcagagccaaaagtgagagtggatgagagtttgggcaggaaacaactgaaccagatacagcatcacctccatgagggctcagctttatctattttgtcttctgttgcatccccagcccttagaacactgcctggtccatctttgctgtgtgaataataataaggaacgatcgctgtgttgagtttgggctgtgaattcagacagtttgctgctgcatacctgattatgagtctcagttttcctcctccataaaatgggcaaaacagtccttgcctcatggggctgtgcatttgtttagcaaacactgaaggagtatacatggtggccaaggcactcttcaagacacaggaagcagacaaaagtccctgccctctgggagcttacatgctcatggggagagatgtatgataagaaacaaaaatagtaggtaagttgcatagtactttagaagattataagggtaatgggaagagaacagcagagaaagggctggggaggcagttgctgtattagatagagctttatcgaggcgatggcattggagccaagacttgaggaagctgtgaggatgtctagagaaagaaggaacagctggtgcaaaggccctgaggtaggggtatatgtgacatgtgtgacagtgaggaggcagatgtggctgaagccagtgagcaagagagagggaaggtgcaaggataaggacagagaggtgacgggacaggttttggagggccttatgggctgcggggaggactttggcttttgctctgagggagctgggagccacggagggcttttgagcagaggagggacgtgacctgactcagatattcataggctcctctggctgctgtgaaaagaacagactttgaaggttgggggcaggcagggcagaagctggggaattaggaaggaggtgacagtgttggtcctggcaggtaatagtgggggtggaaccaggttgttgtctgtggagataataatgagtggctggattctggttataatttttaagtttttttattgtgataaaatgaatttttttattgtgataaaatgaaatttaccactttgaggtgtgcaattccacagcacttactacagtcaccctgttatgcaacagtcacctctatttaatctcagaacatttcatcccccctaaaggaaaccctgcacccattagtagttacttccagtttctcccttcccccagcttctggaaactactaattctggatataagttgaaagttgaccagtaggatttctaggcagacaggtggtgagggctcaatgcattcatgcacagaaagtactcaggtggcatatcataggtgctcaaaactgaaatggtgatgatgagttggcaatgatggtgagtccttccagaatccctgctctagtgctaaactgacctacctggctgtgtagaattctcacctgctggccgggagggtggcagaaccaggatcccttcttacttccagtctggcttgggttagggataggggaggaatgatcagaagaaccaagctagcaccatctgttctggaacatcatccaactcttgtccagatttcccagaactgagcaggaaaatgtccagggaggaacagtgcagctgatggaagtcctggtaagccctggccccagcttcctgagctgctgttgcaccaactagcatttgttggaccttcagtctgagccaagatggcagcttcagaggaagaacaagaagtgtacaagtttctttcatggttgtgtccccgcctccttatatagcctcatataaacccctgcactatcccgttactgtttgcctctccctgaaaagagtgtaaaactcccccactttttccctacttttcacaatgtgttttggtttctaaagatgaaactcctttaattatgttctggttgtaattttctggctccttttatttctcccttacttgatgtattattttcccttgttccttctgccccctgcctccattgatgtttctcttcactgctatctagatttaattctcaactcctgccaagttcagggtgatagtgcaaaaagacatggaccatttagtcttgaattcaggtcccacttctgacaccttcaaagctgctttactttgggcaagtcatatgatcttcctgagggggtatcctttaccttgttcagctaacatttcttgtttttctctgggcacagagtagagtgtcattttccccacctccctgaagttaggtatggctgtgtgatttggtttcatcaatgaaatgtgaggggaagtgacgtgagtccttccggacagaagccttaagggtgagcatgggattcaccatgtttcctttttcctgcctccactgtcatggatgcacaaagatggaccctctctcaaagtaagtgctggagagaggatgacatagatcagtccccatcccacttcatagcatgagtagaaaaatagacctggggtgtgttcaaccactgagatctggggattgtttgttactgcagcaggacatagactaggctgactgtatacctcattatctgcattttggggctgatatctaatcacagtgtctccaggaagattatgttgatgtatgttttagggatggatattcatattttcctataagggctcaataggtttggaaatgtcacatgcatgtaaacttctgattaacaaatatttcttgctttccaatttcttcctatagtgcttctaattttcctgtttttcaatcttgaataaaatgtgagaagtgtttgacttctccttcgaggagattaatggtttctaaagcctggggcattgatttagtcattctcaacctccttgtttctatgacctttttttctccttctctggtcacttagtgtctgctaaggggtgaaggaatgtctgttttaactcattgcattttttttttttttgagacggagtctccctctgttgcccaggctggagtgcagtggtgtgatgttggctcactgcaacctctgcctcctgggttcaagtgattctcctgcctcagcatcccaagtagctgggactacaggtgtctgccaccactcccggctaatttttgtatttttagtagagacggggtttcaccatattggccaggctggtctcgaactcctgaccttgtgatccgcccgccttggcctcccaaagtgctgggattacaggcgtaagccaccacacctggcaaactctttgcatttttaactcttgacatcttcatcttctttttcccacctcccctttgcctgttcctcccctgctcaccccaccagggagtttataatcaggttctagaacctgcaatgtttttctgttgttgtcttccatcttccttgagtcttatgggaatcggccatagtcgcaaattaacaaatagctctgaagcgcctcaagcttggaggcatttccttttgctcacctaagcaagatcctggagctgttgcaaatatcctgccccctactgtaaatctgtcttcatggttgtaagagattcagtcggggtcagtgaagacccgagcaggagatcttggccgaggctccttgatgttctgtctgcgctgggtgttgtcatattgattaagctcctgggactgctgccagcagcctctaggattaaatcaatagagtttgcaaaagtaaaagcttcttttggagacacagaatatgtgggtttattttttaatgataaagcttcaaggagaatcttcatggatggcagaaccagtgatggaaaaggcgaggcagacccaaatatttggggaagtgcagtggggagcaagtgagggaggtttcattgggaggccggggctttccagaaaatctgtttaactggagttgctaatgcaacagctcagagttagaagtgaaggtggaagatgcaagaaggactgccgctgagatgtaaagagaaatgaaggagaggtggatccatttgctcattcaataaacattttgggaggcaggggggtgggggggagcctgccatgtgcctggaactgggatgtacatggtggggacatgacagtgggcaggacagatgtggttcctcctggccctcctggaacttgtaacaggaaaagaaggcataaaataaggaataggcaaatacagacataattactaattgtggtaagtgtttgggagaaaaccagcagggtcctgtgtttgtttcctagggctgccaggacaaattgccatgaactatatggcttaaaacaacataaatatattgtcacccagttctgaaggctggaagaccaaaatcaaggcatcagcagtgctgagctcccttggacggctctagagaagaatgcttccttgattcttccagtttctggtagttgttagcatacattggcttgattggcttgtggctgcatcactgcagtctctgcctctgtcttcacatggccttctccttcatgtcagtgtcttctcttcctcttctctctctctcttttttttttttttgtcagggcctcactctgtcaccctgtacaagagtacagcagtgcaattatagctcactgcaactgctgcttcccagcatcaaacaatcctcccacctcagcctcctgagcagctgggacttacaggcgtgcaccaccatactcagctaatttttaaatttttgatagagatgggatctcactatattgcccagactggtcttgaacttctgggctcaagtgatcctccctcctcagcctcccgaagtgctgggattacaggtgtgagccactgcacctggcctcttctgtctcttataaggatctttgtcgatggattttgagcccgtcagataatccaggacaatctcatcttgagatctctaatttaattatacttgcagaggccgttttactaaataaggtcatggccagaggctccagaggctaaagcatgggtatgattgcaccactgcactttaggctgggtgacagagcaaggccccatctctgaaaaataaaataaaataagtaacctactacaggccctttgcgtagaggataattagaagtacaggggtaccacgtaagtgaagacctgaaggttgttaagcacagagcagagtgtgaacagaatgagacagagggaggaagagaatcccaggcagagggaacagcatgtgcaaaggccctggggaaggaacaagttcatcatgttaaaaatgagccagtgtagctagagtctgatgagcaaagggactcacaggtgggaagacacccaagaagttggcagagacaggtcacacaagaccttctaggtcaagttccggaggtgaactttattctacatgcaatgagaagtcctcagagaagcttaagtgggatgggacagaactgctttactttaaatatatatacatatatacaaacatataatattacatatataaagcatatatatgtatacatatatacatatctatctacctgtctatatattttttagctgggcatggtggctcacacctgtgatcctagcactttgggaggctgaggtgggaggatcacttgagcccaggagttcaagaccagcctgggcaacatagggagaccccatcactacaaataaaaataaaaattaaaaattagctgggtgtgatagtgtgcacctgtagtcccagctacccgggaggctgaggtaggaggattgctggagccccaaaggttgaggctccagtaagccgtgattgtgcccctgcactctagcttgagcaacagagtgagatcctgtctcaataaaataatttttgtattgaggtgaaattcatgcaacataagttaaccattttaaaatgagcaattcagtggcattcagcgcattcacaatattgtacaacctccacctctttctagtgctgaaatattttcatcaccacccctccagaaaaccctgtatccatgaggcagttgctcctcatcctcccctcccggtatccccccaacccccaccactcctggtaactacaaatttgttttctgtttctatggatttacctatactggctctttcatataaatgaattcaggcactgtgtgacctttcgtgtctggcttctttcacttagcataatgccctggcttctctctggagaatgaaatggatagaccactttggagtctactgagattatagatatttctgtgggaagggacagtggcttgaccttgggtggtgctgaagaggcaatgctgagcaggaggattcaaagtctaatttcggaagtagaattggtggggtctgatgatacatcagctgtagggggaggaagatgtaggaactgggaaggtctcttagggtaaccttacctgattgagctccttactaggcagctggtggtacaattcataacaaaggttaatagagaaagagacatgggattagggagggaatggaagagtttgggccttggacactgtagtggtttgaatcctgtccaccaaaaattcagatgcatttggaacttcagaacctgagacctcatttgaaagtaggatctttgcagatgtcattgagtcagggattgagatgaggtcatcctggattacagtggactcgagattccatggtaagtgcttttatatgagaaggtacaggggagaaagtcatgtggcaatagaagcagagaatggagtgctgcagccacaagccaaaagacatgtagaggcaccaaaagcgggaagaggcaaggaaggatcctcccctagagcctttgaagggaaaccccctaatttcagaaccttgcctccaggatgacgagagaataaatttctgttgttttaagccacccaatctgtggcaatttgtcatgactgccctaggagactaatatagacactcctatgagatgctctaagaagacacagagtggtatagctattgctaagaccacacactgtagcagggaggaaatcaaatggagaaatgccccaactccccctcctctctgatctcttgctggtgcctcccgttggccaagccaacccagaaggcagaagatgtggtggagggcagcgttgcagggcttggatgatgcagtcacagaagtcagccctgcctctaccaggatgccaaacagggcaatgagtggatattttagggagaaagggcaacaagagaatggcaaaatacatcgaaatgcatgcaagctctagaaagaggatagagatagataaagggtgattacctaggattaagccccagggaagaccaacatttagagattggatagaaaaagaggagcaaaaagggaagattgagaagtagagaccaggaggataggaggaaaactagaacaacattaagaagggcatggtcaagtaatctgggcacagaaaaatggccctgggatttggcagcctgggggtctttggtgatcctctttggaagagttttggttgagtgatgggggctagaaaccagcctggggagggtaggagaagaatgtgcagtgaggaagtggcaggaacacgtgaaggcaactcttcatgaaggggagtagagaaattggttggtggctgaaggaaaattttcagtcaagggtggaggttttaatgatggaagaatattgatttctgtaaattgggtcattcccatccattataccaatatgcacgggtgtcttctctgatataggatgctgggattctcaaatgcccatttgagtttagcatcatgaatttaatgtcaccagcccagatagttgatctcattcaggaatgctccactgcccaggtatggggaaggcaactagttgagttcatgcagggatggattttttccaggagagaaacaggaggcaagaaagtgcgatataatcaacctatgtaaggttgacaaggcaggagagggtcctgagaaatggcggggtcagtgggttgcagggctcgatgggatggacgttggtttgcatttaagggagttagtgagctgggaggtggttaaagaggaggtggttcagccgggcgcggtggcccacacctgtaatcgcagcactttggggagccgaggcgggcggatcacaaggtcaggcgatcgagaccatcctggctaacacggtgaaaccctgtctctactaaaaatacaaaaaaaaaaaaaaaaattagccaggcgtggtggcgggcgcctgtagtcccagctactcaggagcctgaggcaggagaatggcgtgaacccgggaggcggagctgctgtactccagcctgggcgacagggcgagactccgtctcaaaaaaaaaaaaaaaaaaaaaaaaaaaagaggtggttcaagacaaggatgctggaaacaggtgttttggaggtggctggtgtagcttctgagcatgcatagctggagtggcttggaggagacattggttattgatgaagaggtagggacatcctccagtgatcaaggaagcaggggaccagcatggacaatggtctctccacagggaaattggaggtcatcaaatgttaacaggttccgtcggagtcttagctcccagcttctgttttcctgtggatctcaggatcttggctgctggtgctacctctgactttggacttcccattgagcccagcagcactgggagggaccttcatggcattggctggtttaaggaagacttccttggctttgctgactttcttgggggccttcttggctacacctgcttttgagggagccctcctcacctcacctgacttcttgggggcaccttttccaccttatctgagttgggaaggtctttctttgattctcttgctttcttggggcccttctcactggtttttctgggggccatgatggtggacatattccagagctgagctttccttttgttcttaggaactaatttgaggctgccagtggccccaccttggtcttagagttgatggtctgcagggaatttccaggttaaaggttttttatttgtttgtttaattttgagacagagtcttgctctgtcacccaggttggagtgcagcggcacgatcttggctcactgcagcctccgcctcctgggttcaaacagttttcctgcctcagcctcctaagtagctgggattacaagcacgcaccaccatgcccagctaacttttgtatttttagtggagacagggtttcaccatgttgaccaagctggtctcaaactcctgatctgaagtgatccggccaccttggcctcccaaagtgctgggattacaggtgtgagccactgcgcctgacctccaggtttaagtttaaaccatgaagtagatggactgtgtagagagagaccagggaaatggaggattttactgaccactgaacagggatgtcactattgccagagaggaaaaggattcccccttggtagagtgaacatataagggaaagtggttgaaaattgaatcaggagacagagacctcacaccactcagaggtccctagagaactttactgacctagaaaaaaagataaacagggagaaggtcttcagttcttgtttggaatctgacactgaagcatcctcactcctcactctcttcccgaccccgagagtctgaaattgattaatactttttgtttaaaacttggcttgttgttttgttttttctttctgttttcatcaagggatctttattttacttttgtgtatttgtgtgttttccatgagtcatgttaattcttccatgtttaaactttttggcccagaggaatttatacatttaaattatggatttaatttcagaaggtacatacacacacacacacacacactcactcatctcactttttaaaaactgtaaaatatagccctgtaaatatccagaaaatatctaatgtgggccgggtatggtggctcatgcctgtaatctcagcactttgggaggccgaggtgggtggatcacctgaggtcaggagttcgagactagcctggccaacgtggtgaaaccctatcctcactaaaaataaaaaaattagctgggcatggtggcaggtgcctgtaatcccagctactcgggaggatgagacaggagaatcacttgaacccaggaggcagaggctgcagtgagccgagatcaccccactgcgccccagcctgggcgacagactgagactctgtctcacaaaaaaaaaaaaagaaaagaaaaagtcagtgtgcatcccctctgacatccagcaacttcacatcttggaatttatgctgcaggaaaattatcacaagtgcacaaggatgtatggtgagatagttattattatcattttaaaagatagggtctcactgtgtcacccaggctggagtgcagtgaagtgatcacagctcactgcagccttgaccttctgggctcgagtgatcctcgtgcctcagcctccccagtagctgggattacaggtgtgagccaccatgcctggcatccccctttttttaaaaaaaggttttaattatgaaaagaatatgggcttgttgttttgtgtggttttttaaaagcttaaaaaatgtgtagtgtgtcatttagaaggtgaaaagcccttaccccatcccacctcccagagataacctctgctagcaatttcgtgtttgtctttcaaattttttcccacacacattctttgtactggctgcttcccctcctgggttactcttctcccagacagaaacagggctcattcccttgcctcctccagcttttattaaaacattaacttccctgtagctggatgcagtggctcacgcctgtaatcccagtgttttgggaggtggggaggcaggaggatagcttgagcccaggagtttgagactagcctgggcaacatagcgagacccatctctacaaataaataaataaataaataaataaataaataaataatggaaatttaaaagagagagggaaggactcttgaaaaccgtccatatcatgcttctctaaatggttgagggctcagaggaaaaaaaatcagcaatttcacatcacggaatttattctgcagaaaaattctcacaagtgcacaaggatgcgtggtcagatgatgatgatgatgattattattattattattgaagaaagtagcagcagcagcagcagtattttaaaagacagagtctcggatgggcatggtggctcacgcctgtaatcccagcactttgggaggttgaggtgggcagatcacttgaggtcaggagttcgagaccagtctggccaacatggtgaaaccccaactctactaaaaatgcaaaaattagccaggtatggtggtgggtgcctgcagtcccagctaccagggaggctgaggcacgagaatagcttgaacccaggaaatggaggctgcagtgagccaagatcgtgccactgcactccatgcactccagcctgggtgctgacccaggttaggtgcaagactccgtcttaaaaaaaaagaaaaggaaaaaaaaaaaaaaaggacagagcctcactgtgtcgcccagggtaaagtgcaatgagtaaaggcccatgatgggaaccctgaggagagagtcaaggggaaagaaaaaaaaaaaagcaaaaccaaaatggaatttaaaaaaaatcaggtgcaatttgcataacagaaaattaaccattttaaagtgaacggctctgtggcatttactgcactccaactgttatgtaactaccacctctgtctagctccagaacattttcaccacccctaaaggagaccttgtacccattaagcagtctctctccttctcccctccccaccaccttcctccagcctctggcaaccacccatctgcattctgtctctatggatttacctattctaggtagtcaacaggatgagatatcccaaaagtccatccatggatgaacagataaaccaagtgtgatatgccttcctcagatattagtctgccttaaaaaggaatgaaatactaatctttgctacaacatagatgaacctcaaaaatatgatgtggctggacacagtggcttacacctgtaatcccagaactttgggaggctgaggtgggcggatcgcttgagcccaggtgttcaagaccaccctgggtaacatagcaaaactccatctctacaaaacaatttacaaaaaactagccaggtgtggtgacatgtgcctgtagtcccagctattcaggagactgaggcgagaggatcgattgagcccaggaggccgaggctgcagtgagccatgatcataccactgcactccagcctaggcaacagagtgagaccctatctcaaaaaacaaaacaaaacaaaacaaaaaagttgatgctgagtgaaagaagccagacacaaaaggcaacatcgtgtttaattccatttacatgaaatgtccaatgaagattttttttggcaacatttattttgagtataatattcagtgagtggaccacacatatgcatgcactgcagtatgttcttggaaacatttcagatttgagaggtctgttcagctatgatgacggtaggtattgtcccttccctccctccttgaagaaaaggaactaaggctggacgcggtggctcatgcctgtaatcccagtactttgggaggctgaggtgggcagatcacttgaggtcaggagttcaagactagcctggccaacatggtgaaaccatgtctctactaaaaaatacaaaaaattagccaggtatggtgctgcacgcctgtagtcccagctactcgggaggctgaggcaggagaattgctcgcacccaggaggtggaggctgcagtcaaccgagattgcaccattgcactccagcctgggtggcagagcaagactctgtctcaaaaagaaaagagaagagaagagaaaagaaaagaaaccaaaagaaaaggaaagaaaagaaaaggaaccaagacctagaagggcaaaaataggaaaagttggccgggcgcagtggctcacgcctgtaatcccagcactttgggaggccaaggtgggcagatcacaaggtcaggagatcgagaccaccctggctaacacggtgaaaccccgtctctactaaaaatactaaaaattagccgggcgcggtggcaggcgcctgtaatcccagctactcgggaggctgaggcaggagaatggcgtgaacctgggaggcggagcttgcagtgagccgagatagcaccactgcagtctggcctgggcgaaagagcaagactcggtctctaaaaaaaaaaaaaaaaaaaaaattggaaaagttatttactattagcagcaattgtcataaagtaatgaacatttattgcatgattacaatgagataaattgtatcctgtttttataagcatattaagttttcttttttaaaaaaatgtatgtatttatttattttaagagatagggtcttgctctgttgcccagactggagtgccatggtatgatcatagctcaatgcagcctcaaattcccaggttcaagcaatcttcttgcctcagtctctcgagtagctaggactacaggcatgtgccaacatgcctggctagttttcttatttttaaatgtatttttgtagagacaggatcttgctgtgtcgcccaggctgtcctcaaactcctggcctcaagcgatcctctgccttggcctcccaaagggctgagatgataggcatctacctctgcatttggcccacattaaattttctagtcatcatgggaaccaaaataaacaatataaaacactcacattccttgagcacttactatatgcagggccctgtaatagattattgtgtgtatcagctcattccattctcacacaacctatgaggttgatgctattttctaccttttatatatgaggaaactgaggctcagagaaggaaactgccttgcccaaggtcaaggccacgtctgatccccaaatcctttcaactcctctgcactactattttttagtgcagatattgccagttttctaagcagaagcatgatttagcagccctgagtagacttctcatttcagaaccaaagtgttggacattgttggataatatgaaaaacaaatgacacacaaacctatttgatactgtttttaattttctcttcatttgattttcctgatgacatgattaatcttttttgcctctaccctgtatgtgaaatgtaggtctttgcagatgtctcagagagtgttaatagttgctgctggttttgttttctctccccggggattcccatccctgggtgcaagtgaaattaaacttgtgcctctttgccgctggccgtggtgctgaaaacatcccgggcagcgctagggttgcccttgttagcatgccatccctgctaagagtcttaggctgatcagcgagtggagagatcttttccaggcttcattttggttagaactgtgtgttgaagattttaaagcccatgtctgggaactggagactgtttggattgtttgaagttgaaatagtcatgaataattcctacttgagatgggcttatgagggcgtggactagcatgcaatggttggcctttactaaactgtggccattggttgggacttgggtgaggtgtaacccatttggtctaatccatatggttagggccccaagtgcacctgcattctatttttttttttttttaaataaaggcaaacccatctatcttctaaccaggatagctcctgagtggtctttggggaccaccagcttaaaagcatagactgtgggctgggcacagtggctcatacctgtaatcccagcactttgaaaggccaaggtgagaggatcgcttgagcccaggagttcaagaccagcctaggcaacatggtgagaccctcatctctacaaaaatgttaaaagttagccaggtgtgttggcatgcacctatagtcccagctactcaggaggctgaagtgggtggatcgcttgagcctgggaggtcaaggctacagtgagctgtgatcgtgccactgtatttcaccctgggcaacagagcaagaccctaactcaaacaaacaaacaaaaaaaggcatagactgtggagttgggcagacctgggtgtgagccccagctctgccagtacctcctatgtgaccttgaaaatttgtttaatctctctgagcctggattttcttgtgtggaaaatgaggcttaccacagaacccaccttgtagaaatgttgcaaggaattaactgaaacaaagtgcttaccacggtatctgcccaaagaagcagttggaaacaaggcagctgtaattatggtcgctgtgcttgttaatggccccataatagttgatcatattgcagagtgaaattggggtatgtgtttaatggaccaaggaatatgtcttaaacccatatatctagggttctggtaccctctactctttttcctggtgattgtgatgagcatggaacttacatgaaaatgaggtctgtttggcttcttcacacaagctcaatgacctggctaactgctacaagtatctgtttccttagaacccacccatcagcagtccccatagtggagacaaggtcacaaagagttgacaaacctgatttgatttccgcaccaaccacaggaggcttgaaatgagatgagggtgaagggcaccacagagggatgcaaggattacttggacactgcaaggtcttgctaagggatgggaaccatcagccacgcccactttgagaattttccttcatgttctgaatctgaagagcaaggtcctgttctcagatgcaagccctccttcttccctacgcagagtcaaacttggtcttttccagggtcacatacagcctctctctggggcctctgcaggtcctgatcaatttcattgtgtatagagctctgtgtctcctcacctgcctgcagggctgtctgctatcctgacttccgagagccatttcggaagccagcttttcctcccatcagggatgcttctcttctttcagcccccgccccgctttggcctcctaggatggctgatttttctggatcccgctgacacaggtgctttctctccgagccaatcagggagcagaaaggctcagctcagctaacagaggcattgctcaccgcagctgtgagttagaactcaggctttctaaatcgggaggatcaggcatgacttgaggttgggctgagaaagcctcgcctgccccccagctcgactacccagtgaaacctttggcttctgcctcgggcgaggcatctcttaccatgccaagaactcagcagcccatctttctttcatctgggcaccaagtacatcattgcatatttcagggggtttcattgtgtccttaacatgctcatggagacttggcttgagatgaagtcggggtttctaggcagcaggacccatgtccccttccttcatttcctccaccggtgatttttgttttgttttgttttgttttgttttgttttgttttgtttttgagacggagtctcgttctgttgtccaggctggagtgcagtggcgttatctcggctcactgcaaactctgcttcccgggttcaggtgattctcctgcctcagcctcccaagtagctgagattacaggcgtctgccactatgcccagctaatttttgtatttttagtagagacggggtttcaccatgttggccaggctggtctcgaactcctgacctctggtgatccacccgcctcggcctcccaaagtgctgggattacaggtgtgagccaccgcaccaggcccttccactggtgttttttgagcatctactatatagagaatgctctcctgggcacagaggatgaagcagtgaacaaagtagacaaaaaatccccacgtgcatagagtgtgcagtctcgtgggagagacagggaacaagataaagaaggaaaaaaatagcagatgcttgactggggacggggactaaagaaagaaaaaaataagcaggctaagggggttgatggatgtgacctttgagtaaaggcctaaaggaagtgagggagggagtcatgtggatgtctggggaaagactattccaggagaatgaacagcaggtacaaaggcccctgggtacaaatgtgcctggggagtttggggaataaaagggaggccggcgttgctgtagctgagtgactaagggagagaatagaggagatgaggggagggaggtaatgggagcaggtcatgcaccttgctggtgctggaaggactttgtttttgcttttgagtgagatgggatccatgggaaggctttgaatacttccacatgcattaggctgaaattttcttttctgcttttgtcgcattccaacattgcttttatttcatcaaaatcttcggtttcttctcaggctctttacccaagtgggagcagaaggctggtacccagggctgttcagttctccccctggggtcagaacgtggaggagaaagcttggaggagaaacaggaacccccacctctttctggatgactcaaaaccgcaattacctgagctcctcctcctatccctgaaatagaggcacttagcacttcctaaacttcccggtgcacacaaatcccctggcgatctttttaaatgcaggttctgactcagcaggtggatgcaaggtctaaggctgcattcctaaccggtgctggttctgggaccacactttgagtagcaagggtctgaggtcattgttgcagatgtccatctggggcatgtctgtggacacttgcgggggtgcgggtgagcagagggaggggggatgatgttggaaaagcagtgtgagtatctgtgtttgataagaagtaagaaaatgaagcaaggtgggagagtagaacctctttatttttgcctacgtgctaaggttttattgccatacccagagagccctgggtctgaaatccaggcaacactggccagttgaaaccctgatattgcagcccataaaagtgctgcatgctgcatggtggacttctgggactcttcctggaaccttcagtgccagagccggtccaaaggaagtcacatccctgccattgaggggcaggagaccagggaaccggaggagtgggatggcagaagcgcgtgtaaggaggctgagttggcagggagagaaagcgaagtcagcttcaaatcatagcgagaggagaccagggaagggcttggcgttgctgctctgtgtacaaatattgtctcttattttccaggctgcagggtgaggcagagtggagtatttgtgcaacacagcccagctttgttctctgggctcctaatgcctgtcagctcagaggcagaaagccaatcagagatgatcgtcggcaaggccggcttttgttggctccccaaattgccctgagtctcggattttgcttttcagagtgtgctttcagctggaggcaaaggctgaagctggtgacaaaaggaagcctggttttcctggctttccgagacttttactgagggggtttctatttcagactccgttttcccacctggaaagcaggttccactctccctccggcctggaagggatggttttatggtgcttccaaaatgccaaacctaactccagggcagaagaggagactgaaaccaattaattttccaaaggttagagctacgaggaggggagaggtttagcatggtcaagttccccaagacatactaattgatctctctacagaatgcgggatttcagtgcccccaggggacactcagcaatgtttagagaccacttgaggttgtcatcactggacaggaggggctgctactggcatctagcacacacaggccagggatactgttgaacatgctgcagtgcccagacagccccaccaaggagaatgatccacccctaaacctagtgctgaggttgggaaatcctgctccggagtaaccaacaccctatggctttttcactcaagcagccgcttctccagcgcttacacctcctcagagattgccagatccatatgcagagcctgttggcgtgggacacttctgaggggtgtggcagggagacagcggacattcccatttaccagctgatcagcaggttaggagctaatatgaaatgaacaagatagaccctccccacctgccctgcagatcctctggtgggacactagggagggaggcctcctaaacccaaatgacagttcccaggatgcagggaggagtttacctatgcaaactggagagaatgcaaatggggcatctagagatacttactggacgacccctcccctgcctcgggtcttggaagaacagattctcagaggtctgccctgatcactgtaattttttttttattgaggtaaaattaatataacacaattaaccattttaaagtgacatttagggctgggcacagtggctcatgcctgtaatccccgcactttgggaggctgaggaagaaaggtcgcccaggagttcaagaccaccctgggcaacaaagtaagactctgtctcttacaaaaaaaaaattaggcacacatggtgttgtgcacctgtagtcccagctactcaggaggctgaggcaggaggatcgtttgagcctaggaattcaaggctgcggtgagctatgatcatgccactgcactccagcctgggtgacagagcaaaattgtgtttctttaaaaaaataaaagtaaaaataaataagaaaagaaaggagaggggaggggagaggcgtttagtacactcacaatgttgtgtaactgtcaccttcatctagttctaaaacattaagcagccactcccatttcccttgccattccccaggaacaacaaatctgctgtctgtctctggatttgcctgttcgggatatttcatatacatggaatcatacaatatggggtattttatgtctgcttctttcgcttggcataatgttttcaaggttcattcctgttctatcatgtatcagtacttcattccttttttttttttttttttgaaacggagttttgcttttgttgcccaggctggagtgcaatggcacaatcttggctcactgcaacctccgcctcccgggttcaagcaatcctcctgcctcagcctcctgagtagctgggattacaggcatgcgccaccacacccagctaattttgtactttttttagtagagatggggtttctccatgttggtcatgctggtcttgaactcccaacctcaggtgatctgcctgcctcggccttccaaagtgctgggattacaggcgtgagccactgcacccggcctacttcattcctttttatggctgaatactattccattctatgagtagaccacattttgtttatccattcacccactggtgaaatttaggttgtttccatcttttggctgttgtgaatagtgctgctgtgaatatttgtgtatgagtgttcgttggaatacctgtcttacgatccttttgtgtttataccttggagtggagttactgtgtgtcacatggtaactctgtgattaactttttgaggaaccaaggaatggttttctatggcagttgcactggtgtttttttgttgttgttgtttttgttgttgttgttttgagacagggtctcactcccattgcccaggctggagtgcagtggtgcagtcatggttcactgcagcctcaacctcctggggctcaagcaatcctctctcctcagcctcccaagtagctggcactacaggcctgcgccactatgcccggctaatttttcatattttttgtagagatagagtctcagtttgttgcctaggctggtctcggactcctgtgctcaagtaatcctcctacctcggcctcccaaagtgctgggattacaggcatgagccaccgcatctggccagctacaccattttatattcccaccagcatgagggtttcaatttcttcacatcttcaccaacacttgttttctgtttgtttgtttgtttttaatagctatcctagtggatgtgaagcagtatcccgttggggtttgatttgcacttccctgatcactaataccctcatgtacatattggccatttgactgtcttctttggagaaatgtctattccagcctcctgtccatttttcaattggattatctttttgttgttgtgttgtaaatgttctctctttattttttatttttttgagacagagtctcgctctgtcgcccaggctggagtgcagtggcacgatcttggctcactgcaagctccgcctcccaggttcacgccattctcctgcctcagcctcccgagtagctgggactacagatgcccgctaccacgcccggctaattttttgtatttttttagtagagatagggtttcaccgtgttagccaggatggtctcgatctcctgacctcatgatccacccgccttggcctcccaaagttctgggattacaggcgtgagccaccacacctggccgtaaatgttctttatatagtactagacccttatcagatacatgatttgcaaatagcttctcctattctgttacttgccttttaactttcttgataacgtcctttgatgcacaaaaggtttaaattttgataaagcccagcatatctgttttttcttctgtggatcatgcattaggtgtcaaatctgatcataatgttttatttatttatttacttatttatttattattttatttatttttgagatggagtcttgctctgttgcccaggctagagtgcagtggcatgatctcggctcactgcaacctccacctcccaggttcaagcgattctcctgccccggcctcccaagtagctgggactacaggtgtgtaccaccacgcctggctaatttttgtatttttagtagagacagggtttcaccatgttggccaggctggtctcaaagtcctgaccgcaagtgatccacccaccgcagcctctatctatttttaatttatctctttttttttttttttttttgagacagggcctccttctgtcacccaggctggagtgcagtggtatagtcattgtacactgcagcctctacctcctcggctcaagcaattctctcgcctcagcctcccaagtacctgggaccacaggtgcctgccatcatgctggccctgccaccatatttgaaattgcagccctgaccccttccactgtctatagtcttcaccatcttactacataacatagcatatatgatgtactgtataacatggtatatgcagtgtactgtatagcatagtatacatgatgtagtcatctcatttatttgcttctcctctgggaagcaggaggaagcttctcctcttgtctgctttgctctcaactgtgtccctagcccagaacagagtctggcacacagcaggtactgaatgaatatgtgttcagtgaatattgtgggtgagatagaaggtgaatatccacatttccctttagaagtcacctgatctgggtttgagatctgcagggatctactccagacaggagaacgaataattccacctgtgctgatgagttggaaggatctagagggcttgagatctttccactggggtcagtgggggtgggtgcacctccaacacccttcttttctttgaacaagatttttccttaattccccaatactccctttgaatatatgattttagccaccatcatagcgaattgcatcgtcctcgcactggagcagcatctgcctgatgatgacaagaccccgatgtctgaacggctggtgagtgatgtcttttctcagggtcttctccttggctttagcaggacattaatttttgggggagtggagcagggcacagaggaggctctcagtcctggagcccagagccagatcatgggaagcctaaatttccttttcattttttcttgaaccagagtctcgctctgtcacccaggctggagtgcagtggttcagtcatagctcactgcagcctccacctcctgggctcaagccatcctcccactgcagcctcctgagtagcagggactacaggtgccaccatgcccagttaattttcttatttttatctttttttgtagagatggggatctcactaggttgcttaggctggtctcaaactgcccactttggcatctgacataatttcaggcagtatactcaaatgaacattgttaatgttaataattatgtcttggccagacactgtagctcatgcctgtaatcccagcagtttgggaggccaaggcaggtagatcacttgaggtcaagagttcgagaccatcctgaccaacatggtgaaagcccgtctctactaaaaaaatacaaaattagctggatatggtggtgcacacctgtaatcccagctacttgggaggctgaggcaggagaatcgcttgaacccgggaggcagaggttgcagtaagccaagatcgcaccattgcactccagtctgggcaacaggagtgaaactccatcttggtgggggggaggcgaaaaaaaagaaacaagaatattacaaaggatacagatgaagagatgcaaagggtgagatataggagaagggtgtggctggcagcttctaggtagcttcaggagggggactggtcaccagaaagaccaaggcatgattcgagggttgcgactttcagccccaccccccaacctctgggagggcagaggggctgaaaatcaagttgatcaccaacggtcaatgatttaaatccaaacctctaatcatgccttggttttcccggtgaccaacccccatcctgaagctacctagaagctgccagccatcagtcaatccttagcctgcaaaaagacatccctttggagatcccaagggttttaggagctgtacaccaggaaacagtgtcaaagaccaaacatacatttcacaatgtcacagtcttctaaaaactataactagcctagcaaacctatgatttctagatctttgcattttcacttaaaataaagctaaataaaaagcgtccattgaaagactggtaagcaagtagaagtaccagtggcaagctaatgtggaaaaaaaaaatcattcaggcagagtgaaaatgattgtagctcgagaaacgttgctgtaacagatgggaaaacattcacattggggctctgatggagaagagcttgtagcttaatttcaaatatgatagattagcagctggaagccagaaccagccggaggttctgcagaggaactggaggtgaggatactggccacttatcagccagtacagaagtcctattccaaacctttaacaatctacatgccagctgagaaccatcctaaggggtcagatttaggagtgaggtcaatgcacaagctctagcctcaaataccttgaacgctgcatgtgacaagtaaattctctaaaccaatgctttccattagaactttctgcagtcacagaaatgatctccatctgccctgtccaataggattgtcacttgaaatgtagccagtgtgactgcagaactgtgttttttattttattgcatttaaattaattttaattgaaatagccacatgtggcctgtgactgtcgtattgaataagacaggtgcaaacaaataattctgtttagctgagtgatatgtgaggttggcccaaaaggaatgaaggaggaaggtgccttctctaggcattggctttgctcgcaaaaggctttggacaagagaactctgcaagaggcagtgaggggtggtgagtgcaggagggtcaggggaagtgagagggtgataggtactgatttctaggtgggctggttccctgatcttgtcaacatctgcccagcccaagacgctgaccttgccttctctcccttccaggatgacacagaaccatacttcattggaattttttgtttcgaggctggaattaaaatcattgcccttgggtttgccttccacaaaggctcctacttgaggaatggctggaatgtcatggactttgtggtggtgctaacggggtaagtggcgcgtgctatacgctttggatttaactagctgaaggattacgaggcttttggttggtgtggtccgggccaggctcaggaaggctgagcccttgtgttctccctccccttgttatgcgcctgcctcctttctgccaacaccccacctccatgtctcagctgtatattacagcagatgctttctgttacaattaaaataatagctcattattgttggctgcttccagagtgctttatgcccattctctaatttaatccttgcaacaacccactgaattaggaaatattaatattcccatctgaccactgaggaatcagaaactcagagtgtaacttgcttaaggccacccagcaagtaagtgatggaactgggagatgaacagaagattatgcattccagaactcaaggttttaagtgttgtacgtgcatgggtctcttgatttgcttgaggatatcttgcttttatttcaacttggtgaatgttttttgagaatgtctgggtgcaagggattgtgattatgacaaaggagaaaagcaagctaaataaggtacagttactgtcttcaaggagttttcagatccatatatgatgaactgtggttgaaatgtgtatatgctttcctctaagcaccctgtatgaggtagcacttgctggtataacaaaagatccaaagctaggaaatgacttaaacacggcagaagtttatttgtcactcatagaaaattcaaaattgagctgggtgtggtggtgcatgcctgtaatctcagcactttgggaggctgaggtgggaggatcacttgagctcaggagttcaagaccagcttgggcaacacagtgagaccacccccccatctgtaaaacataaaataaaataaaaattaaccaggcatggtggtacatgcctgggagaattgcttgagctcaggagttggagggcacagtgagctatgatcatccaaccgtgctccagcctgggcaacagagcaagaccccatctcgaaaaaaaaaagtccaaaataattgttcctagttgacaggctcatctcctccaatgactgacggaccctgacccttgccatattgtggctcttcattgtcagcccacatcatccaataactccatgcttgtctgtatcaaaccaggaaggagaagtgagcatagaaggtgatacttggaaaggtttatgagtttggaaggggtgtgacccatacctgttccattcatatcctattggctagaactcggtcacatgaccacacatcactgcaagggaagctgggaagtatcagattgtgcttagaagaaaagggaaatggatttggagaatgacctactagtctgtcagggaccttaaaaacttttattagattccagtagggacattagtatctggtaccaatggctggttcctcctcttcccactctctactctcctctcagctaagtctgggctcttctattctaagacccttcttcactggacacctttttcatagtaatcatttacaggatcatagctttccatgttttgttgctgctccaggttctgtctctcttggcggatgtgatgggttgcagcacccacactgtgctggccgggctctcacaatgcagatttgtttcagagcaatgttgcctctcacagaaggagctgtggcctattgggctgtttctgtagaggccttcagatgtcagcagtctgttgtaaggactctgggctagctctcatgggcttgggtgttcacagagggatctttgttggctgtgctcacagttcggtggcttgggaccttggtgggttccaagggcatattatggtactgggcacttttctcttagtctactaggaaactcatctagaaacagcctagtggctaacttttttattgtttaaaaaatgtaaagctgggcagggtggctcatgcctgtatcccagcacattgggaggccaaggtgggaggattgcttgggcccaggagtttgagacgagcctgagcaacatagcaagaccacatctccacaaaataaaaattaaaagtgtataaagctgggtacagtggcacatgcctgtaaccccaattactcaggaggctggagagagaggattgcttgagcctaactagtttgagaccagcttgggtaacctagcaagatcccatgcaaaactaagtagagaataatagagcaaacacctgtgtatacattcatttattcaatgactatttattgaacacttctgtgtgccaggtcctgttctaggctctgggacacagcagtaaacaaaatagaaaaatcccctgtcctcatggagctgagagtctactgatggagatggacacaattgatgaatgaatctagtgtgtcagatggcggtgaggggtacagaggaaaaataaagcaggggagggatgggatgtgtggcaggcaggggtgaggggtgctggaagccagggaagacttcactgggcatgtgacatctgaatgaaaacctaagggaggtgagtgagtgagccatgaggagagctggaacagagtgtcaggcaaagggaacagccagtgcaaaggctctgaggctggactgtatctgacatgtttgatcaacagtaagaagacccacatggctagagaaggtgaccagaagaatggggagaattggggatagagaagtaatggagtaacctgctatcaaaacacaacctttctctttttttttttttttttttttttgacaagagtctccctctgtcacccaggctggagtgcagtggtacaatctcagctcactgcagcctctgcctcccagtttcaagtgattctcctgcctcagcctcccaagtagcttggattacaggcgtgtaccacaacatctagctaatttttgtatttttagtagagacgggtttacgccatgttggccaggctggtcttgaactcctgacctcaagtgatccacctggcatggcctcccaaagtgctgggattacaggcgtaagccactgtgcccagcaaaacaaaacctttctaacctttctaatccctgttttctccctccctagacccattcctttctctcccccatccaggggcactttcctgaattttatgtttattatttgcatttatgtattcacactttggctgcctaagtatataagaaatatatgctacctatttttacacttcaaaatattttttaaatagcatcagagtgagaatagtttacactttgactacatgcatagataagaaatatgtgggctgggaatggtggctcacacctgtaatcctagcaattttggaggcaaagatggaaggattactttaggccagaagtttgagaccagcctggccaatgtagtgaaaccctgtctctacaaaatgaaataaaatgtaataaaatattcagctgggcatggtggtgtgctcctgtggtcccagctactcaggaggccaaggcgggaggatcacttaagcccataaggtcgacgctgtagtgagctatgactgcactccagcttgggcaacagagcaagaccctgtccctaaaaaatgttttttgttgttgttgttgttttttgtttttttgtttttttaataaaggccaggtgtgatggctcacacttgtaagcctagcactttgagaggccagggcaggaagactgcttgagtccaggagtttaagaccagcctgggcaacatggtgaaaccccatctataaaaaaaatgcaaaaaattagccaggcatgatgacgcacgcctgtagtcccagctactcaggaggctgaggtgggaggatcacgtgagcccaggaggtcgaggctgcagtgatccgtgattgcaccactgcactccaggctgggcaacaaagtaagaccttgtctcaaaaaaataaaataaaataaaaaataaaaaaaagaaaagagaaagaaaaaaagagatatgtggtactgtttttcaaacttcacatttctctaacctgacttttgtgttcaacatgagataaatctgattaataaaaatagtttccatgcatccattttcatgactgcatagtattctgtggtaggagtatgctgccgtgtatttatctatttggattgtttccagctttgggctattttgacccaaagtgtccctgctttctcccaagtgagtttctctagggcacgtacccaggagtggaactgctgagttgtatactgtgtgcatcctcagccccactaggtattgccaaattgctctgcaaagtggttgtgccaattcatgctccctgggggctggcttctgctggctgaggctggcttgaccttgctggcaggaaggagccttaaaaatccctgtgtggttttttttgttttacttttattttaagtttaggggtacaagtgcagatctattacatgggtaaacttgtgtcttgggggtttgttgtacaggttatttcatcacccacgtattaagcctagtacccattagttatttttcttgatcatcttcctcctcccgccctccaccctccaaaaggccccagtgcgtgttgttcacctctgtatgtccatgtgttatcatcatttagcccccacttagaacacgcagtatttggttttctgtttctgcattagtttgctaaggataatggcctccagctccgtccgtgttcctgcaaaggacatgatcttgttctttttcttggctgcatagtattccatggtgtatatgtaccacattttctttatccagtctatcattgatgggcttttgcagccctgtttttttttttttttcataataacacggttatgggaacacttagggaagctcatatattattgagcagtgtgatggttaatattgagcatcaacttgatcagcttgaaggatgcaaagtcttgttcctgggtgtgtctgtgagggtgttgccaaaggagattaacatttgagccggtgaactaggagaggcagactcacccccaatctgtgtgggcaccatctaatcagctgccagtgtggccagaataaaagcaggcagaagaagttggaaagagtagacttgctgagtcttctggccttcatctttgtcctgtgctgaatgcttcctgccctctaaaatcagattccaagttcttcagcttttggactcatggacttacaccaatggttagccaggagctctcaggcctttggccacagactgaaggctgcactgtcagcttccctacttttgaggtttgaggactctgacggatccaccactggcttccttgctcttcatccttcagatgggctatcgtgggactttaccttgtgattgtgtgagtcaattctccttataaactccctttcatatatacatctatcctgttagttttgtccctctgaagaaccttgactaatacagacacctagtgggtcccaataagtgatcattaaactgaaggcagtcattcagtaggtcagtttgtcacttgtgtttgtatctccctgcttacaacaaggtggcctttcttctagtttcctgtcatctgatggaagagattctagactcattcctctagaggagaaatacttcatctagaacagataggtcctaagggtgagagctcatcgttgggatgaatgaacccactgaaattttatgcaagaagaaaattgtgtatatgtatatttttttttctggtctgtagtttttattagattctcagggaatcctgatcctatcatgaagaccttctattctagattgggttcctttcacatccccttctcctttcttgttgaattctccatgcatttctttcacttgcttttcttgctcttatttctctggtagtcagttatcctttttgtctggtggttctatctccttcaaatgaggcacattgctcaaattttattactccaaattccaaggtgctgtttagtgtcctgttgggttgtaagctaggaacagggaggggaaagtaaaacattctgcatgagctgggtgcagcgggcaagcacctggaattccagctactggaagctgaggtgggaggattccctgagcccaagggtttaaggccagcctgggcaacaaagtgagattttgtcttaaaaaaaaaaaaaatcccagctgggctctgtggctcatacctgtaatcccagcactttgggaggcagaggcgggcagatcgcttgaagtcaggagttccagaccagcctggccaacgtggtgaaaccccatctgtactaaaaatacaaaaaaaaaaaaaaaaaagcctggcatggtggtgtggtgtgcactggtaatcccagttatttgggaggctgaggcagcagaatcacttgaatccaggaggcagaggttgcagtgagctgagattgtgccactgcactccatcctggatgacagagtgagactctgtctcaaaaaaaaaaaaaaaaagaaagaaaaaacacgcgcgcacacacacacacatcatgcagacctagccttctgccaatgtcaatggtagagaaacacagtagacacttaattctatgtttcagagaggaggggactcaaatatattaatttgacattgagacagtgatgactttaatgagtactttctttcctttttttttttttttttttcgggacagagtgcagtggtgggattttggctcactgtagcctccacctcctgggttccagcagttctcctgcctcagcctcctgagtagctgggactacaggcatgcactgctgtgcctggctaatttttgtatttttagtagagacggggtttcacactatcagccagactggtctcgaactccggacctcaggtgatctgcccacctcggcctcccaaagtgctgggattacaggcatgagccaccgtgcccggcctaatgagtactttctgattaacctgttgccctctcagattcctgaagcaaaccacagcgttaaaacgtgattcattttgtgtggaccaccacggtgtttaccttcttcttgggtgaagtttggtggaaaagatcttaccccggacatctgtttgttctttgtaactcagagcctcagagaaatcctaactttataatgttgtcaaacccttgtaaggcatgtttttattgtatttgtgttctgatcatgaaactgaaaatgtgtaagaggaagatttcagaagcttggctgtatgtctgagatgacagttcttttactgtcattctcaaatatatataaatattgaagagatcaaataacacaaatcgtgcatgttaagaaaagagactgtgaacctcaccagagaggggtgagcacaattttttttcttttttattcacagggttagcactgtccctttcacataataaatgctcagtaaaataaatggttgttaagccggaaaagggtaacacttctgataatgagtgtcctgggaaatttactaagctgtttagaagatgggaccaacacactgatagaaatagtcagatagtccagaagtctatggcagatgccctgaacatcagatgagatataagacagagaagctctgggtctttgccagctctgacattttatgactctatgaaacggaaggttcctttttagaagggtctataaactgtctcaggctttgggccattttgttgaagatcagaggcaaggaaaagacacaactacacaggaaccatcagggaaagatgttgttttttggtcttgaagcatcattgaatttttttttttttttttgagacggagtttttctcttgttgcccaggctagagtgcaatggcatgatctcggctcactgcaacctccgcctcccaggttcaagtgattctcctgcctcagccttctgagtagctgggattacaggcatgtaccaccaagcccgggtaatttttttgtatgtttagtagagacgaggtttctccatgttggtcaggctagtctccaagtcctgccctcaggtggtccgcccacctctgtctcccaaagtgctgagattacaagcgtgagccaccgcaccgggccgcatcattggattttaaggctccatggattctggcaggtccagcccttctgttttactcacaaacaagtggtttgtccaaagtcacacagagatggtggcaagagatctagaataagaaggtgtcttcaagtcatggagccaggaaccctggctttttgggcaatggaagtggtataaatgtttaatatcacccctcaggttctgccactagagcccagctctctcttccttcctcttgccccctgactagcctatggcctctttccagagaataagaaagggatcctcagagaataatcccagttcctcgctttttattatatagttgaggaaaccaagtctcagaggggtcagtgtcttgaccatacacctctcatgtcctctctcctttttgattaattgaataaatacatgtagttgcttcttacctcctttctttcttcacccctgccccatgcacctgctcttagttgccttcacatgtaaacagcattccaacaacaacaacaaaacacaaccagcattctaactcatgagaccagcaacagttcctataaataccagcagcattttattttaatgtctctctgcagtagtttctcccctccatggatcagtcatccttggtaccaaaaggattccccactgtgacacaaatgctttttgtcattctcagtgagttataccattgagagagcatcgatctttttattgttcaaagcttttggttgtcatgatatttgctggaccatgtttcaccaggaaccacatcacttcctagcagcaggagctattttcttccatcttctaacaacaccagcagtgacagtgataataatgatgttagctgccatggtcgttattcttatcatttattgagtacttactatgtgccagggactacattaagagttttatgtgtattatcacattgagcctcgctagcctttgtacagatgaatctgaggctcagagaggttaagctgctcacaagggagtcacacagctggtaaggggtggatcaggatctcagcctctctgctaggacacttctctaaacctagaataatactgggcctgtgttaagttcagcaaagagctgtattcaacccagtgtccttaggaatgtaatgcctgttattaacaacagtggcaacattgataagctgaaacttatgaggtgcttacaatatgatatactatatattatatacatacataggcacccacctataatctcagcactttaggaggccaagtcaggaggatcacttgagcccaggagttcgagaccagcctgagcagcatagcaagatcctgtctctgtaaaaagtttattttttcagttggccaggtatgttggtacatgcctatagtcccagctaatgaggaggctgaggcaggaggattgcttgagcccaggaatttgaggctgcagtgaactatgatcacaccactgcactccagcctgggtgacagagcaagactgtctctaaaaataaaaataaaaataaaattatttcaactctcaaggttaaataaatactattattattcccatttacagatggagcaactgaggctcaaagacattaaatgcttactgtcttagtctgttttctgttgcttatagcagaacacctgaaactgagtaatttataaagaaaaagcaatttatttcttacagttatggagactggaaagtttaagatcaaggctgcatgagctataatgcacacacactattgcactccaggctgggtgacagggtgagaccccgtgtcaataaataataatataaaataaataaaacaaatttcaacatgagttttggaaggtttgaaatattcaagccagagcatctgtctcataagtggtggacccaggatttgaactaaggcagatctggatctagaacccattttcttgaatcctacgctatttctctaaggtcaagtttgccaaggaaaataaacttgagaatttgaatagagctctctgacatgggaagtcagggtgatccttccttcccctccctgatcttgggttccactatggctgggggaaaacaggagcagaagagatttcaagaaatgagagattggcctagcgccatggttaagacctggacttcagagtcagaggaagctcctccctctatgacagtgagaatgtgggttgaactcactgaacctcagttttctcacctggaaaaagggagtaaaactagtgcctagctcctagggtttgcatcacacacgaaagttggtgaactgaaggaaaaaaacttaaattcttgtgggggagcatgtgatagatgctacaaattctccatgccttatttacctagcttacgtctaagttcacctgcagcttcctcttggtacactcccatctctctacatctctgttggagggcagtctctggcatcacagagtttgctgagccagatgcttaacaacctcggtagcatccctcaaccagtgagctagggagtcagtgtataaataccctggcttccccattgctcagtgggaaaacactgaaatatgttatacagcatcatagaggtgcctcagtaaaattgaatcctagttgttcacataaaacccattcactagtgtaccctttaccaatctctctcttcctcattcctcacttgtaattccttgcattacctcccaaattaaccattggaccctagtttttgccttggggtctactcggcgctaactcaaggagcggaagttggaagcttagcgggttacaggtttcagcaccctggacagctcccagcacaccgtattgtgctaaaatgttctcttccctccctctgcctccagctggggtggagagggactgagtaaaggccagatggccaggtgaccttgttccatactgagcttcttggccattttccctgtggggctggagaagaccttgccatccatctctccgcaggtttgggggccgactgaggtcttgttttctcgaattgctatgacaaatgccagcctgcctccaaggggcatctgtcccactgcctctacagtttgcatgcctaatgactcctctcctctcaccagggcagggaggtggctgcctggtgggccgcttgaagccgggagaccaagatcatgccactggactcgcaacaaaccgagactcttttttttttttttttttcctcgagacagggtcttgctctgttgcccaggctggagtgcagtggcgcgatcttggctcactgcagcctccgcctcccaggttcaagcactcccacctcagcctcccaagtagctgggattacaggcgcacaccaccatgcctggctaatttttgcatttttagtagagagggggtttcaccatgttggccaggctgatctcgaacttctcccctcaggtgatccactcgccttggcctctcaaagtgctgggattgcagctgtgagccaccatgcctggccaacagaataggactctgtctcaaaaaataattttttttaaacattgctttgcaacccagctgcttcttgtgcaggcatctctaaatgaggacagccagtctacatagacacgtaaggaagcatagtggttaagacctggtctttggggttagagtggattcccaacctgactccactgtttccaagctgtgtgaccttgggcaagttactgtacctccctgaatcttccatttcttcatctggaaaatgagagtagtagcatcccctgacttggtggggcatggtggctgatgcttgtaatccaaacactttgggaagccaaggtgggtgaatcgcttaaacttgggagttcaaggccattctgggcaacatggtgaaactccatctctacaaaaacaaaacaaagcaaaaattatctgggtgtgatagtgtgtgcctgtaattccagctactcaggaggctgaggtgggagaatcacttgagcccaggaggtcaagtctgcagtgagccgtgcttgcaccactgcagtccaacagagcgagaccttgtctcaaacaaacaaaacaaaacacaaaacaacaacaaaatactaccaccttatggagttgttttcaaggttcaatgagttaatgtctgacccatgctgggctgggtttatggatgttacttgcccagggacagtctgaagaaagagaaagtgatatagtccattgggcctcagcttcctcatctgtggaatgggaataataattgcacctacctcaaaaggtaaaagtcagtgagatacatataaggcattcagaacaaaaactggcacagaataagtgctcaattatattagctattgtaagactaataactatcattataatgatgataataattattactacttccccaggcccagttccatagaccagttagttaactgtagggaacgtttgctattattagttgggttcccaatatctgacctccctttccaatttagggagaatcctcccctttctataaagtactgctggtctatgggatcccaccctcactaataagttgaaggtgaaagggattcattgtcaccccatcacctggtagtcagggcatgtgatttaaacaaccagggccaggcgcagtggctcacgcctgtaatcccagcactttgggacgccaaggcaggaggatagcttgagccaagcccaggagtttgagaccagactgggcaacatagtgagacccctatctcttaaaaattttttaattagctgggggtggtagcacaggcttgtagtccccgctactcaggaggctgaggcaggaggattgcttgagcccaggaggtcaaggctgcagtgagccgtgatagtgccactacactccagcccagcctgggcaacagggcaagatcctgtctcaaaaaacaaactaataaaaaactcaaccagtcacgttttcctacccaggaatttgaaaatggaccaagtgatccaaacatgatggtttggactctttcatggcctcctgctacaggagaaggtcaggctggctacattgttcctgctgatttcccaaatcccctcttctggccccctgttgattatctgagtttcctaaaaatcccttttatgcctaagatagccggtcagtgtttggttttgcaatcaagaacccagactgggccaggcacggtggcccacgcctgtaatcccagcactttgggaggccgaggcgggcagatcatgagatcaggagatcgagaccatcctggctaacgtggtgaaaccccgtctctactaaaaatacaaaacaaaaaaaaaaaaattagccaggcatgatggcggtcacctgtagtcccagctactggggaggctgaggcaggagaatggcgtgaacccgggaggcggagcttgcagtgagctgagatggcaccactgcactccagcctgggcgacagaacgagactccgtcaaaaaaaaaaaaagaaaaaagaagaacccagaacccagactgatcctgagacaaagatttgagggcaacgaatcacgaggtcaggaaatcgagaccatcctggctaacatggtgaaaccccgtctttattaaaaatacaacaaattagctgagcgtggtggtgggcgcctgtagtcccagctactcgggaggctgaggaaggagaatggcgtgaacctgggaggcggagcttgcaataagccaagatcgcaccactgcactccagcctgggtgacagagcaagactccatctcaaaaaaaaaaaaaaaaaatttgaggacaagtggtttgtttggcaataccaggaaacaggggaacaggatagtcagaaaagaaagagaaagctgggcatggtggctcactcctgtaatctcagcactttgggaggccaaggcaggtggatcacctgaggtcaggagtttgagaccagcctggccaacatggtgaaatcccgtctctgctaaaaatataaaaattagtcgggtgtggtggcgtgcacctataatcaaaataaaataaaatcaggatattttattttaaaactctgtcttagtgtaactcatatttacctcttctgtatgctcctttgcatcagttatatattgccataatacggctgtgtaacaaacaatccccaagacccagtggcttataatgacaagcatttatttagctcatgattctgaagggtggcagtttaggctgggcccagttgggtgctttatctggtctcagttgagctcattcatgcatctttggtcagctgcgggtcagctgggtggctcttctgtttggctgttagctggctgcagactggtccaggatgacctcggctggaatgactgtgctccactccctatggtctttcaccctccagcaggctagcctgagctagttcacatggcagcttttcatcctccagcaggctagcctgagctagttcacgtggcagcaatgggattctaagagaaagaggaagtgttcagccttcttaagggctagtcccaggaatggcacaacatcgtgttggccactgttgtccaaagcaagcaatgaagctggtccagattcaaggaatggggcaacagagcccatctggtatttacctggggccactggggccccattcctgttccctggggccttttgccctgacttctgtgggccctcagagcatattttcagattcctttccatccctgaccctcagcaatcaatgtagatgacgtgtcattactgtgtcacttgcacagagaaaaggaggaaaaaatgtcagcaaaaactctgctgagagcagagggcccatcatacagcaagctggaaagaaaagtgggaatgattacacagcctcctcagatgcttccagcttttatcaaatctcactgtgatatctgagttctgaaccctcacaggtggttggcgtgcaagggaagagatttcttgtctgccatgctgacatgcacagacacgcaacctggctccctctgtccactggggctttggattttgtttgttgaaatgttacccactcctgatcagagctggatggaaacctggctctgattccattggctcaggggctcaggtgggggcagaggccaggctggttgggtgtctatgtggagaccttaactcttctccctcccgccccaactctttttgtttctttttttttttttttttttttttgagatggggtttcactcttgttgcccaggctggagtgcagtggcgtgatcttggctcactgcaacttctgcctcctgggttcaagcaattctcccacctcagcctcctgagtagctgggattacaggagcacgccaccatacctggctaatttttgtatttttagtagagacagggtttcgccatgttggccaggctggtcttgaactcctgacctcaggtgatccaccctcctcagcctcccaaaatgctgggattagaggcgtgagccaccacacctggcccttttcttttcttagctgcctccacctctcttcccttctgcagtgttaggtttatggaaaccgaggccggcgtagagatcaacttcagagagcatgaactgagcatctgctgggtcttagatcctttacatagcttatcatcttcaaaccttctcacagttctgtgtggctagagccaggatttggacacagctctgccccactgtagaaccaggcttccttctgtccactgtcaaattttagagggagaaaatagggaaagggacaccagccttctccacgagcagcttctgcccactcaccccagggactttgcacatgctgtgtgcctgtgtctgagatatgctccctcctctgtatctgcttaattcttacccagacatgatacataaagtatttaacatccaggtggcagggacaccagctaacctgaaaagaggttcccctgttgtgccacatgtgtactcattgtttgctgcattgtgggggcagtccaggggccttgaagaggggccaaggtgccaaaggggcactctcaggcctcaaggaagtacatgtttactgatatgatactgtctcttcctccaggaaggaagccttccctgatctccccactgcatgcccactatgataccagtttaggtcccctctttatggccatctgtggcatcagtgtgaatcctcttaatgttgtctatttggttaatcatctgtctccttcctctggggggtaaagacagaaccacagagcctcgtgtagaacttgagaatggggttcagtaaaaatctgttgaatgcataaatgggtgattgagtgaatgaatgaatgagtgaatgaatgagtgagtggatgaatgaatgagtgaatgaatgagtgagtgaatgaatgaatgagtgaattaatgaatgaattcatagctgataatacaggcttcatggcttttgttaggcttgcccagacattgctaggggatggacagaaggaagaagagctatacttaattccagtcctgttgttctgtagcaggaggagaaaaacagggactgcccagcctgctctgggtggattcaggagcagctgaggttcctctcttatttgcaaacagggaattcaaaaagccccaacctcagaatcacactcgcctcagcagctgtaccagccaaggggacaatgtgggaagccttgggcaccaggaatgctgagtgcttcgaaaaagcgaaggctcagggaacaatccctgatttttcattcccttgtcctttctgaagaaacaggcaaaggcaggccaggcacggtggctcacacctgtaatcccaacactttaggaggccgaggctggtgaatcacttgaggtcaggagttcaagaccagcgtagccaacatcatgaaatcccatctctactaaaaatacaaaaattagctgggtttggtggtgcatccctgtaatctcagctactcgggaggctgaggcatgagaatcacctgaactggggaggtggaggttgcagtgagctgagtctgcgccactgcactccagcctggatgacagagtgagactccatcttaaaacaaaacaaaacaaaaacaagtaaagccttgtgtgtttttaaattgtaggttcagcagcaaagctctgtaataaggagctggaccctgcagtcagacagtcatgggcttctccagtgcccagccgagtgacccgagggagttatgataaacaccaacattcatccacaatttgtacctagtgctattctcaatatcttgagtaaattatctcatttaatcctccaggcacatctttcttggtaggtgccgtcattgtccccagtgtacatctgggaaaatgaggacaggctggcagagcacccttcctgctcacctctgctgctctgctgacctctggcaagactgttgtctctctgagcctcagtttccccatctgaaaattggggcctgtattagcccgttctcacattgctataacgagatgcttggctggggctgggcgtgatggcttatgcttgtaatcccagcactttgggaggctgagttgggcagattgggagtgtgagaccagcttgggcaatatagcaagaccccatctcttctaaaaaaaaaaaaaaattagccaggcatggtgatatgcacctgtaattccagctacccaggaggctgaggcaggagaattgcttgaacccaggaggcagaggttgcagtgagccaagattgcgccactgcactccagcctgggagacagagtgagactccatctcaaaaaacaaattatttttaaaaaattaaaaaaaaaaatgcctggctgggcacagtggctcacacccataatcccagtactttgggaggccaaggtgggaagattgcttgagcccaggagttccagaccagcctgggcaacacagtgaaatcctgtctctactaaaagtacaaaaattagccaggtgtggtggcacgcgcctgtggtcccagctactcaggagggtgaggtgggaggattgcttaagcctgggaggtcaaggctgcagtgagcaatgattatgccactgcactccagcctgggcgacagagtgagaccttgtaaaaataataataataataataaataaataaaaaccctgagactggggtaatttataaagaaaagaggtttaattgactcacgattctgcaggctctacagaaagcatggcagcatctgctcagcttctgggaaggcctcaggaaacttacaatcatggcagaaggtaaagctggagcaggtgtcctcacatggccagaacaggaggaagagagagagtggggagatgctacacacctttaaatgtccaatctcacaagaactcactcacgatctcgagaatagcaccaaggcggaaatctgcccccatgatccaattaccttccaccaggccccacctccaacattggggattacaattcgccataagatttggttgcggacagacacagatccaaagtacattaaaagtaatggcaaaaaccacaattacttttgcaccaacctaatatctcaggggctcattgtacctatttcacaggacaaatgaaggtatcagtaataacagtagcctgtagtcccagctattcaggaggccgagacaggaggatcacttgaacccaggaggtcgaggctgcagtgagctatgatcacgccactgcactgcaccctgggtgacagggcgaaaacttatctctaaaaataataataacaacaacaatagtgaacacagatataacatgtgtgtggccaggctgtgcccttagggctttgcagggattatttcattcactctcaatctccccattttacagatgagaaaactgacgttcagaaaagctagaggacttgccccaagccacacggctaggaagtggtggaattggggtttaaatgaggaagcttgacttcagtgtcgaagctcttaactgccacactcaatacatggagtagaggttgctgattctgtgattatctgattctggaaagtaaagaccctgtttccagacgtttgctgcttgacttagttcccaggggatggccactggatgatgcagtgttgcccaggagaggttagctagacacactgcaaccattccattgctaatacttatacttgctcttgttctgctgggtgctatgcagggaagggctgtctgagccctttgcaagaattctcccattggtgcctcccagagattctgaggttggggctttttgcatcccttattagcagatgagacaccaaagcccaggtcaataatctgacctgcatcccccgcctaccagccagaccaaggtcacttccccacaatgcaggccctgatccaaggctctgggtgcaaaccagtttccatgtccctgggggtccatcttcttcagctgactttttttttttttttttttttttgagacagcgtcttgctttgttgccgaggctggagtgcagtggtgtgatcatggcttattgcagccttgacctcccaggctcaagcaatcctcccacgtcagcctcctgagtagctaggactatgggcacacgccatgatgcctgggtaatttttttttttttttttttgagacagagtctcgcactgtagcccaggctggagtgcagtggcgcaatctcggctcactgcaagccccatctcccaggttcatgccattctcctgcctcagcctctcgagtagctgggattacaggtgcctgctacctcgcctggctaattttttgtatttttagtagagacggggtttcaccgtgttagccaggatggtctccatctcctgacttcgtgatccgcccacctcagcctcccaaagcgctgggattacaggcatgagccagatgcctggctaatttttaagtttttttataaaggcggggtcttgctatgttgcccaagctggtctcaaactcctggcctcaaaaagtcttcctgcctcagcctcccaaagtgctaggattacagacatgagccactgcacccagcctgactttttttctaactgaaaaattaattatatatattcatggagtacaatgggatgttctgatatatgtttacatttttgaatgattaaatcaagccaattaacatatccactacatcgcatacttattttttgtggtgagaacgcttaaaatctactcttttagcaattttgaaatatacaataccttatgttgtatattacattatgttgtatagtacgttgaaacatacactacaatacgttatcattaattgtggtcaccatgctgtgcaaaagatctctaaaacgtattcctcctgtctgactgaaactttgtatcctttgcctaatatctccccaatccctccaccaccagcccctggtaaccaccattctctctgcttccatgggttcaaattttttattttttgaaatttttaatttttatttatttatttatttatttatttatttatttttgagatggagtctcgctctgtcacccagtctggagtgcaatggtgccatcttggctcactgcaacctccgcctcctgggttcaagcgattctccagcctcagcctcccgagtagctggggttacaggtgcttgccaccaggcccggctaatttttgtatttttagtagagacggggtttcaccatgttggctaggctggtctggaactcctgacctccagtgatccacccacctcggcctcccaaagtgctgagattacaagcgttgagccactgcacctggcctaaaatttttttttttttttttttttttgagacggagtctcactctcttgctaggctggagtgcagtggcatgatctcagcccactgcaacctcagcctcccgggttcaagcgattctcctgcctcagcctcctgagtagctgggactagaggtgtgcaccaccacgcccagctaatttttgtatttttagtagggacagggtttcaccatgttggccaggatggtgtcaatctcttgatctcgtgatctgcctgcctcgggcttccaaagtgatgggattatgggccaccacgcccggcctcaaattttttagagctcacatataagcgagattgtgtactatttgcgtttctgtgtctggcttgtttcatcttagtataatgtcctccaggttcatgcacgttgtcgcaaaagatggaatttgctcctttttaaagactgaatagtacttcattgtgtacatatacacgccatattttcttcatccattcctttactgatggacatttgggttgtacctgcatcttggctattgtgaagagtgctgtcatgaacatgggtgtgcagctgactctgaggtgttagagggattacagctcctccaaaagaccaccgtcacccaaacctgctcctcctgccctattttctgtttaggtaaaggcggctttaaccccctgcagtgctctggcctcagacctccagatcttcctctatgcctctatgcctctttttctccaccccctgcatccaatctgttagcacatcttattggctctaccttcagaatctacccagaatccaccacccacctctcaccaccttcacagccccaccccggtccagcccccatctttgctggcctggactaaaccagttgcccctccaccccaatctggtctcttaacttcagtccttgccccacccccaggactgttccccacacagcagccagagggcacctgtgagccactgagtcaggacctggctcctctttgctcacaacctcacttggagaaaaagcccaaattctcctcacagggacccacaaactctgcccctgtgatcccccatccccctctattcccactctcctctccactcactcggcttcagctacacaagttccctgctgtcccttacacaccaagcactccccagcctcagggcctttgcacaggctgttccctctgcctggaacactcttcccccagatatctgcttggctcccccctcacttcctttgggtctttgctcaagtgtccttctaacatgtaactgcctcacctgcactgtgccaccccactccccgcctctaggcttaatttccctctacacccctgaagagcatctgccaagctatatttacttgtttattggttattgccaatcccctgcccccactagaatgccagctccatgagggcagggacttctgtctgttttgttcactgctattcccccagagcctagaacacagcctggcacatagtaagtattcactaaataatttgtaatatgaattgtgccagtaaaatcttccaggggcatcaagcccctgccatgactaggtggtaacatcctcaccccctgtccatgtgctatctcctcctgacctgcttgtctcattgttctaatggtggctcacgcctgtaatcccagcacttggggaggccgaggcgggcagatacctgagttcaggagtttgagaccagcctggccaacatgatgaaaccctgtctctactaaaaatacaaaaattagctgggcgtggcattgcacgcctgtagtcctagctactcgagaggctgaggcaggagaatcgcttgaacccgggaggtggaggttgcagtgagctgagatcatgccattgcaatccagcctgggccacaagagcgaaactctgtctcaaaaaatatatatatatatttcattgtggtaacatatgcataacataaaatgtaccattttttaagtgtttagttgagcggcgttaagtacattcatattgttgtgcaaccaggaccgccatccatctccagaacttttgcatcttgcaaaactgaagctctgcccccaggaaactctcactccccgctcccccttcccctctccccgactcccccttcccccctccccactccccccaccctactccacactccccactcccccagcccctggcacccgccgttctagtttctatctctgtgaatttggctactttgggtcccccctgtgagtagaatcatacagtatttgtctttttgtgactggtttgtttcgtggagcataatgtcctccagtctcatccatattgtagcatgagtcagaatttccttcttttccaggccgaatcgtattccattgtgtggatggaccacactttgcttatctgttcatccagatgggcacttggcttccaccttttggctattgtaaataatgctgctgtaaacctgtgtgtacaaatagctgagtccctgctttcaattcttttggatatagacccagaagtggaattttttttaaatcaagatttgacccactggggcccttagaggtctcattggctctgaagcttttttttttttttttttttggacgctttgaaactaaaaataggagtgaggggcacagtgaggggggcacacatctctcgtgtcagcgttttttaaaaacaccccgggaggaagatgtgtgaaatccctcccttccccccgctcccaccccctccaagatctcaaaatacctcttgttttaggaagcggctgtgacatcaggcaggcagcgtgtggcatctgagacacaatatcgcaagtggctgggagcccagagaaaccaggacaggcgtgctggggatgtggactagagatggagctaattttagtggctgaagaggctgcaagaagagagagaaagaggggtgtgtgtgtgtgtgtgtgtgtgtgtgtgtgtgtgtgtgtacgcacagtgatagaggctggagggggagaaatgacagataaatcagcttgggcaaagaaagctaatgggcagaggagcgagacccagctcagaaggtggtcagcaaatctaaagatgtgtgcccgagggtcaaggtggtggggggattcataggcaagtggtagagaggctattccatttgcagaggctctctctgtttgaggcgtgattcacctgtgccgtcctcaaggccattctgagaacaccactgttgttttcctccttttatgagtagggaaactgaggcattgaactgcttctattcttcagtaagaagcagggggaacatatggtagaagcaaagaaatacaaacatgagggctctcggggtctacgtgattggctgtgacatccatgagagcggatcgcaggttgaaggaaacactggtggcagaaagtagctgaacatttggatttgggaatcccagtggacgtggcgaaaattctggcttttcccttcacaggctgcggggccactctgacctgcggtttccttatctgtgaaatggaacgatgccacctgtctcagcgttgttttgaggatgcgaggagatgatccgtgtaatatgcccactagggggcctgctccagggtagattctcagcaaatggtagtcatggtttttgttacatttggggatattggcaggtaaaaaggaaatacttcattcattccaaaattgctcactgaggttctactatgtgctaggccctgatgacacatcggtcaacaagacaggcctgctttctgcccttgtaaaacttcagttcaactgcattgcactcatcagcctaataatccaggtaaattgtgatgagaataacaactagcatttactatgagccctttacaaatattaacccatttaatcttctaaagagcctataagataagagctcttgccctgcgcagtggctcacgcctataatcccagcacgtcgtgaggccaaggcaggtggatcacctgaggtcaggagttcaagaatagcctgaccaacagggtgaaaccctgtctctgctaataatacaaaaattagccaggcatggtggcaggtgcctgtaatcccagctacttggctgaggtaggagaatcgcttgaacccaggaggcggaggttgcagtgagtcgagatcactccactgcactccaagagtgaaactctgtcacacacacaaaaaaaaacaacctgttattatccacattttacctatgaggaaaccgatgcccagagaggttaagtaactgtccaaaggtcacacagctacggagtggtagagctgggattcagacccaggagtgtgatcccagagtgtgtgtgtatgtttgtttgtttgtttgtttgtttgtttgtttttaccactgtgttttcctgcttctgcaatagaagtaatcaccagtaacactgagcagttgttatgtgccatgcccttaacacacatctccttggatctttggaaagaatcctaaaagggttgtttttcatgatccacattttatggagagagagagatcaaagcatagagagaggaagtaacttgcccaagatcctgcagctgaagactctagggttgcaaatttgggacggccctggaccctgcattccagcttctagcagctcatagggggaactctttatttatttatttatttatttatttatttatttatttattttgagatggagtttcgctcttcttgcccagcctggaatgcaatggcatgatctcggctcactgcaacctccgcctcctgggttcaagtgattctcctgcctcagcctcctgagtagctgagattacaggcatatgccaccacgcctggctaatttaattttttttagtagagacggggtttctccatgttggtcaggctggtctcgaactcctgacctcaggtgatccgcccatctcggccccccaaagtgctaggaatacaggcctgagccaccacgcatgccctgggggggaccacttttatcggtgcatttcttccattttccctgtgtctgtgtaaagataaacacccccaagccccttgactatgaactgtgggccataattagttaatggaaggtaaatgttttagagacggaaattgctgtgccatttttccccgctaggcattgttgcctgcatgctaatgcaacacaatgtgcctttcttctgtcaggcatttttagacaaattctattttccctaaaatattttgccaaagaaaatagcaaatggggaagacattcagaggctcaggcagagagaggacaccattcccttgggtttaaacagaatggcagagtggataacagcacagatcttgagttaggtggatgccaatttgtgatttatttcccagcaaaccaagatgctggctctctgtgtgcctcagtttacttatttgtcaaatgaggagaataatggtacctgtctctcaccagcttaccagttgcctctttagctatgtctaatctgctattaaccacgcccactatgtctttaattccaagtattagaattgttttcttcctacaagctgtctgatcttttttaatcctgcttcatcttttgcagtattgttttcctacagcaggatttctcaaccttggcacaattgacattttgggctaggtaattcttggccgtgagctaccaccctgtgctaagatacttagagcatccctggcctctcaccctactaaatgccagtagcagcccctccccagttgtggcagccaaaaatggctcagacattgccaaacgaaatgtcccatggagggtagaaacgcccccacttgagaattgttctataggtattttcaagcatgtcttacatttctttaagtataatatgcaaaagaaaaggctaaatctaaaaaaagcccataatatgcgaagaatttttataatcagtgtccaataacttaagtatctaaaattgttatggctttttttctgctgtctcttgtttcctgtgattcctcattctggtgccttgttttcttgaatgtcttgttatctttggttgtgtgaagctcattttccatgggacactattttttgttttgttttgttttgagacagagtctcgcttggttgcccaggctggagtgcagtggtgcaatatcagttcactacaacctcagcctcccaggcccaaatgattctcctgcctcagcctcctgagtagctgggattacaggcgtgtgccaccacacccagctaatttttttgtatttttagtagaggcagggtttcaccacgttggccaggctggttttgaactcctgacctcaagtgatcaacccgcctcggccccccaaagtgctgggattacaggtgtgagccaccgtgcccggcatccatgggacactgttgaagggagttcattgaggcctgcgatgaaggcgaaccctccatggacaatttgcatttactttttccaggtgtctgggaaactcccagtctaggaccatcttagacttttagaccaacaatgtgttgagaatttaggtcaccagtgtctgcaaaagccagcttgtggttataatttctcaaaaacttttgtttttctccttttctgcaaagtgccaaagtaacttcctcaaaaatctctgggaatggaaagacgggagtaaattaacttcaggtttcttacctgaaagtgatagcctattggggccccatcctacttggggagtggtgtgtctcctttgagactttctaacacgtgtgtaccctggactttgccccacccctgctccctaggaggccataaaacttgaagcagcagttccatgggttagacagatgcccttggggcaaaagtggttttaatgctctggtagatgctcaggttacctctgggaaattcttgacttcacttatttatttggggctgataactactaattgtcaggcctttcttgtttcaacaacatggacttcagattttatgcaggatttgtcatcgttttcagcaagagagtcagtcttattacccagcttactgcattagaaatagatgtctgggccaggcgcagtggctcacacctgtaatcccagctgtttgggaggctaaggtgggcggatcatgaggtcaggagttcgagaccagcctggccaacatggtaaaaccccatctatactaaagatagaaaaaattagctgggtgtggtggtgcgtgcctgtaatcccagctacttgggaggctgaggcaggagaattgcttgaacccgggaggcagaggttgcagtgagccaagatcgcaccactgcactccagcctgggtgacaggacgagactctgtctcaaaaaaagaaatagatgtctgttgtgtggattatttaaaagagtagatggccaagaactatgacttatgcctgtcatctcagcactttgagaggctaaggtggagggatcacttgaggccatgagttagagaccagcctgggaaacatagcaagacccccatctctgcaaaagtaaaataaaataagttagtgtgcatgatggtgcaggcatacctctagtcctagctactcaggaggctgaggcaggaggatcacttgagcctaggagtttgaggctacagtgatctatgatcatgccactgcactccagcctgggtgacagatcaagaccctgcctctaaaacataaaaataaatacaaattaagttaaaaaataaaataaataagtaatagaacatccagcacagttcttggcatgcattgactgttgttgtttgtttgtttgtttgtttgtgacggagtctcactcttgttgcccaggctggagtgcaatggcatgatcttggctcatcataacttccacctcccaggttcaggtgattctcctacttcagcctcctgagtagctgggattacaggcacgtgccaccactcctagctgttttgttttgtttgtttgtttgttttgtatttttagtagagatggggtttctccaagttggtcaggctggtctcaaactcctgacctcaggcgatctgccagcctcggcctcccaaagtgctgagattacagacgtaagccaccacgcctggccagctgttttgattgttaaatgaaggtggtatgaaagggaaggaagaacagtgacatttgcaagggacactccctggagggcagggcaagggggctgtggaggggagaagtcagagagtatgatacaggttgccttgggtgatgttttagattttagccaacattggcaaagagcctcatttatctctcagagtagctctggctactggaaatgctgcacaacttcaggcggactttctagaagaaaactcttggccaggtgcagtgactcacacctgtaatcccaacactttgggaggctgaggcaggtggatcacttgagctcaagagtttgagaccagactgggcaacgtggcaaaacctcatctctacaaaaaaaaatacaaaaattaaccaggcgtggtggtgcatgcctgtatcccagctacttgggaggctgaggtgggaggattgcttgagcctggggaggtggaggtggtagtgagccaagattgcaccactgcactcccatttgagtgacagagcaagaccttgtctcaaaaaagaaaaaaagaaaagaaaagaaaagaaaattctctctgggattcaatcctggcccacacagcattggcttcacttcacctccttctcccctgagatacacagcaccattcccccaagcttcatcaacttaatctctgatctgggtgctgtgacttgtccccattcctggccagaatttaaggtagggatgaacccactagccctccatcacgcactctgccataaaagcacaccacgtgctgattgctgtctttggtctcctttctgccttgccctctagactctgagctgcttggagacagaggccagttttgtccatctccaaatcccctaaagtcctgtggccagcaagcaggtaggacatctgaaagttcgtcagagagggaattgcttttctcttgagatgcaactagaacaagaatcttattgacctggagtagcttcaaggttgtaagagtatgtgtcagggttctccaagaccactctcaggtttgaaggtttgctaaaagggctcacgggacccagaaaagctgtgaaattcagttatggtttattacagtggaagaatacagataatacagattaaaatctgcaaagcaaaagatgcacaaggcaatgtccaggggagatcaggcatgagcttccagctgttcactcccagtggagttatgcaaacagtgctcaattctcccagcaatggtgtgtgacaatgtacagtgtaccgccaaccagagaagctcacctgagccttggtgtccagggtttttattggggctcagttacattgacatggagcacccatgtgactgactttaactgctgggtctccagcacactccaagatcaaactgataccgtgtgtcccagggccccagctgaacacaaacaggcagtcaccatagatcccattgtgagcataagctaccaggcatggcccaaagccctagatatacagatattctttccaggagccagccaagggccagtccttcctttggaatatgcagagtttgaactccccaaccccaaggagttaactctttactacacagaatataaatctcaccaagtctttcttcttgtcaagtcctctcaaggtgacccattgcttttagcagtgtctttgagaccctgcgtcatctggccttgacccatatcacctgtgttatctctccactctagctacattgaacttttcttttttgagatgtggtctcactccatcacccaggctgaagtgcagtggtacagtcacagctcactgcagcctcaaactcctgggctcaagtgatcctcccacctcagcctcctgagtagctgagcccacaggtgcatgccattacacccagctaatatttttatttttagtaaagatgggttctcactatgtttcccaggttggtctcaaactcctgggctcaagcagtcctcccatcttggcctcccaaagtattggcattacaggggttagccaccacatccagcccattgaactttttaaggatcccctagcatcctatactttctgtcactggatagccttggaattatttttccttctttttgaaatactcttcttctttccaccctttgctgtcaagtctcagaataggcattatttcctccaaaaaccctctcctgaccctccaaatctggatgaggacacttcctttgcccagagagcacctgttttaatcctctcaggtggctataataaaataccttaaactgggtggcttatacacctcagaaatttattttccacagttctggaggctgggaagatcaaggcactgacagatttggtgtctgatgaggggccatttcttgtttcgtagaaggggtcttcctactgcatctttccatggtgaaaagagttgaggcagctctctgaaacctctttcatgagagcatgaatccctctgtcttcatgatctaatcacctcccaaaggccccacttcctaatatcttcacattggtgactaggtttcaacatatgaatttgagaaagacacagacattcagaccatagcagtgctcttccaccaggttttttatccccctgtattataattgaggtttaaattatctgctttccttcccttagattgtaagctccatgagagcagggccctacccatccagtcattgtcctatcccccatgactacaacttcctgggtacataattaatatttattatattatgtagcaaaggtatgctgccatactaagagacccaaaaggccaccggattaaaaccttaaagaaaaaaaaataatttctctcctataatagctgcaaggttagccatgcaggttggcagggaagctcacttccacaaagtcactcagggattcaggctcctgttgccctcttcttttctaccaccaaatgatcttcagcaccatttgcacaatcaaaacttaactggtcttgaataggcagaccttgaatttctgaagtctcagacccaaaagtggcagctgtcacttccactgacatatcactgatggaaacttaatcatgtgatcataccaaactgctagggatgctgggaaatgtagttttgttgggaactccatgacttggctaaaattccattactgtagaagatggtgggggatgggggagtggtggacatccagtggttgctaccatatttattgaatcaaattgtcaaacaggacctatctgataaggggttcttttccagaattaactgaagtattaaatcaggggcaaaggcatgtcacctcatctttctctccctatattggctttctagggctgttataacagagtaacatgaacttggcggcttaaaacaacagaaatttattttctcttagttctggaggctagaagcctaaaatcaaggtgtcagcagagccaccttgacaactgctctaggaaagaattcttccttgcctcttctggtggctcctggcaacccttggtattctttgtctggcatccacttcaatctctgcctccatcttcatttgccttttttctctgtgtgtctatgtcctttcctcttcttagaaggataccagtcattgaatttagggcttactctaaatccaggatgatctcacctcaagatccttaattagttacatctgcaaagagcttatttcaaaacaagattgcattctgaggtttcggtaaacacgaatttgggggaaatagtattcaactcaattcactgctttacttaagaaaagagaccatgaagtgagcctccttctgcttgagagagagagcgagcctttctgtgcaataggtcaatgaatggatgcagctgaattccacataactttataaaaatagatggccagcccatggggtttgctgacccctgcccaaaaattccaaagtcaacagcagtctcttttttaatcatttctctattttttaatttatttttatttttatgttgagatagagtcccgctctgtcgcccaggctggagtgtagtagtctcggctcactgcaacctctaccttccagatacaagtgattctcctgcctcagtctcctgagtggctaggagtacaggtgtccgccaccatacccagctaatttttgtatttttaatagaaacagggtttcaccatgttggccaggctggtctcgaactcctgacctcaagtggtccacccacctcggcctcccaaagtgctgggattacaggcatgagccaccatgcccggccaggattttcttcattttaacagcattcttacttgtcccacatccattctatcctgggtctaattagataacaaaatctacagatcttgtttaactgacattgtcctgggggatactttttatcttttgagacaaggtctcactctgttacccaggctggagtgcagtggcctgataacagctcactgcagcctcgaccacctgggttcaagcgatcctcccacctcagcctccagagtagctggaaccacagatgcatgccaccacacctggctaatttttaaatttcttgtagaggtggggtctccctatgttaccaaaggctggtctcaaactcctgggctcaaaagagcctcccaccttaacctcccaaagtgctgggattacagatatgagccactgtttccagccttggaaatatagtctaagaactgagtcaataggcgattttgtcattgtgtggacatcatgtagagaacttaacacaaacctagatggtataaactactgcacacctcagttatggggcataccctattgcacctaggctgcaaacctgcacagcaggttactgtcttgaatactgtaggcagttgtaacacaatggtaagtatttgtgtatctaaacatatctaggccgggcacggtggctcacgcctgtaattccagatcacctgaggtcaggagttcgagcccagcctggccaacatggcgaaactccttctttactgaaaaatgcaaaaattagccaggtgtggtggcaggcacctgtaatcccagctattcgggaggctgaggcaggagaatcgcttgaacctgggaggtggaggttgcagtgagctgagatcatgccactgcactccagcctgggtgacagagcaaaactccatctcaaaaaaataaaaaataaaaaacatatctaaacagaaaaggtacagtaaaaatacagttataaccatatgggaccaccattgtataggcagtccgctgttgatcaaaacatatcaaaacatcgttatgtagcacatgactgtaccataaaccacacggcttcaaacaagggaaatgtattctctcactgttttggaggccataggtctgaaatcgaggtgtcaccagggtccctccaaaggatccgggggaggatccttccattggatttggagttgcttcactccagtctctgcctcagtggtgacagggcgttctcctcttccctctcaaagttccctcttctgctgtgtcataaggatacatatgactgcatttaggccccactcagaaaatccaggaataaactcttgccctcatattcttaactaaatcgtacctgcataccttattttttctaaataaggtagcattccagggattaggacatcaacataacttctggagggttcactgttcaacccactacagccagaatgcgctttgaattcaggttctgacatctgggactgcctcccacgtacacacaccactaccttgtactgaatgcctgaagggttctgcccccacctccactcccccaaatatttgctgtggacctgagaaagctgacttcatggaagcttcattccattgttctaaggacttttcatacattaacaaatgtcttctctctatggggaaaaccacagagaaatcaagacagagtggggttaagtaactcacctgaggaggaacagtaagtggcagagccaggattcaaaccaacatggttttgcacagttttgacatcatttgcaacacaaatattgtcacagatacctttttgagcatctactgtgctaaccgccaggaaggaaaagaacatggggccgggagagctcttgacaggggacagggctggccatggaggtctgtgtcttggtggaagatgctatggttctctttttttttttttttttttgagatggagtcttgctctgtcacccaggctggagtgcagtagtgcaatcttagctcacagcaacctccacctcccgggttcaagcgattctcctgcctcagcctcccaaatatctgggattataggcacacaccaccacgcccagctaatttttgtatttttagtagagatggggtttcaccatgtgggccaggctggtctcgatctcctgaccttgttgtgatccacccgcctcggtctcccaaagtgctgggattacaggcatgagccaccacactgggcaactatggttctcttttaactccttgtgctgaaattattgcagaagcccaggccagttcatccccagaaagtgaggcataaacaggcagagctctacagaaacagagaatccacgactggtttgatggaggctgcctcactacctacagaatgggctctgggtggattgttctatctggggagccagcccacccaccagtctcagcccttggcgactctttcctgctgtcacagcagctggacattcagaaaccgaaacatgacagccttccctccctgttcctgcccagtggagtggaaacccctcgggacccacataccgagcgtgcacagcagcacagagttgcacagttaacacagcgcttcttctccagccctccggatgcaagctgacagattggcagctggctgacttccaaggtccagtgagttcttggcagtcgctttctgacctggacgagtggctgccacctcctggaacatcaggctgcccccttggggagagggtgacggtctctctggaaagactgtgagctttgaggtggtcatcaaaagccattcttggaaacattctttgagctgtaccgtgcaattcggtcaccaattgcacgtatttggatattaatatccgtatgtggatattaaattggttttgggttttgttttgttttgattgtggcaaaatatacacaacaatcctcctgcctcagcctcccaagtagctacaggcatgcaccaccatacccagctaatttttggattttttaaatttgtttgtttgtttttgttttttgagatggagtgtagcactgttgcctgggctggagtgcagtggcgcgatctcagctcactgccacctccgcctcctggattcaagtgattctcttgcctcagcctcctgagtagctgggattacaggcgcccgccaacacgcccagctaattttttgtatttttagtagagatgaggttttaccatgtcggccaggcttgtctcgaactcctgaccttgtgatccacccgcctcagcctcccaaagtgctgggattacaggtgtgagccaccgcgcccggccgatttttgtagttttagtagagacagggtttcaccatgttggctaggctggtcccgaattcctgatctcaggtgatccaccgcctcggcctcccgaagtgctaggattacaggcatgagccaccgcacacagcctaaatgctgtgcctcacgcctgtaatcccaacactttggtaagctgaggccagaggattgcttgagcccaggagtttgagaccagcctgggcaacataggaagaccccatctctataaaaaataaaaataaattagccaggcgtggtggtgcaggcctgtggtcccagctactcgggaggatgaggcaggaggatcgcttgagcccaagaggtcaaggctgcagtgagctgtgattgtgccactgcactccagcatgggtgaaagagcaagaccttgtctcaaaaaaaattaagcgaaatttaaaattctgtttctcactcacacaggctgcacttcaagtgcttaatcatcccttgtgggtggtggctatcatattggacagcatggatagagaatatttttatcagcgtaggaagcttcatcagagaggaccgctcagaggcctgtggggaccagcacagtgcagtagaagacacaggccagctggtgagagactggtcttctgatcccagatctgtccctcacttgctaggtgaccttggacagctccctcagtccctctggagttttctcttcattgttaaatcaggaaattggcctcagtgaattctgaggccccatctacttttttttttttttttttttttttttttttaattgagacagagtctcgctctgttgaccaggctggagtgcagtggcatgatcttggctcactgtaacctccgcctcccaggttcaagcaattctctgcctcatcctccccagtagctgggactacaggcgtgcaccaccatgcctgggtaatttttgtgttttcagtagagaccgggttttgccatgttggccaggctggtctcaaactcccaaccttgagtgatcctcccgcctcggcctcccaaagtgctgggattacaggtgtgagccaccacgcctggcctcatctagttctaaatgttatgacccactcagctctgaagacaagggaggaacatcctctcagtctagctctgacatgcagaagcctctcaccctgtcccccaggtcataaaggcaggcgtgttgtgaagagcacagaatgggctgagaaaaatatgcagggattgcgtctatctcccttccttccgcacgtttccttgtcggcaccacctgcctctattccgcgccgcacacacacccgccttctctctgtctcggaggaagacaggatcttccatcccccaaatcctgccctgattcctactctgaagcctctgccctgactcctttaagctccctgggaatacagcccatctcctatgccctcctcatcccagtagttcctaccttccccaaaatcgctttgggaaagtcccccaatgagtaaccagctgtcctacatgggcatctcagaacttctcttctgttgttgttgttgtttgttttgcttttgttttgagacaggatctctctttttcacccaggctcgagtgcagaggtgtgatctcagctcactgtagccttgacctcccaggctcaggcgatcctcccccctcagcctctggaatagctgggactacaggcacacgccaccacacccgggcaaattttttttaggacttttggtagaaatggagtttcgccgtgttgcccaggctggtctctaactcctgggctcaagcgatccgcccactttggtctctcaaagtgctgggactacagacatgagccaccacacccggcagagcttctatttcttgagtgtgttctcagccatgctaagacattttctcttctcagcctgatgatgcttttggcttgtgtttctttgtttttaattaccccttcccagtcgctgtcatgggatcatgagggtcttctgtccatctagatgacacctttcttgtgccacgtgtctccaacattccctggtttttaaacccttattgctttcaagatactatccaagctccttaatgtggcacattgtccttcgctgctatctgcctgctttttttttgagacagagcctcgctctattgcctaggctggagtgcagtggcgcaatcacagcttactctgcagcctcgacttcttgggctcaagcaatcctcctgcctcagccttctgagtagctgggaccacaggcatgcaccatcatgcttggctaatttatttttatttatttttatagagaaggagtctccctatgttgcccaggctggtctcaaactcccggactcaaagttcattgcagtttcaattttttccttggctcaaggatcctcccacttcagcctcctgagtagctgggactacagacgggcaccaacacacctggctaatttttgtattttttgtagagatggggtcccactatgttgcccaggcttctatctgcttttatctcaccttccactcttccatccttcctttcttttcttttatttcctttcccttcccttgccttccttttctttctttctttctttctttctttctttctttctttctttctttctttttctttctttctttcttgacagagtctggctctgtcacccagactgaagtgcaatggcaagatcttagctcactgcaacctccacctcctgggttcaagcaattctcctgtctcagcctcccgagtagctgagattacaggtacctggcaccacacccggcaattttttttttttttttagtagagacggggtttcgctatgttggccgggctggtcttgaactcctgacctcaggtgatcctcccacctcagcctcccaaagtgttgggattaacaggtgtgagccactgtgcctggccttttttttttttttttttttttttaagacaggaccttgctctgtcactcaggccagagtgcagtggcactataatcactttctgcagccgtgacctcctgggctcaagggatcctcttgccttggcctccctagtagctgggactacaggcatgtgccaccacactggctaatttttaaaactttttgtaggccgggcacggtggctcacacctgtaatcccagcactttgggaggccaaggcgggcggatcacgaggtcaggagattgagaccatcctggctaacacagtgaaaccccatctctactgaaaatacaaaaaattagccaggtatggtggcgggcgcctgtagtcccagctactcgggaggctgaggcaggagaatggtgtgaacctgggaggcggagcttgcagtgagctgagatcacgccactgcactccagcctgggcgacagagcgcgagacaccatctaaaaaaaaaacaaaaaaaaaaaacaaaaaactttttgtagagatggattcttgctaggttgcccaggctggtctcaagcttctaggctcaagcagtcctcttgcctgtgcctcccaaagccttgggattacaggcgtgagcccccacacctggtcctaacccactttctgaacttccaaccacaccattttgtcctaatatttaagtcacaccataacatgtcccacttcagaaatgcctaccaaagtagtcttcaaatctttttaaatcagtggaccctttctaccaaacaaatgttattttttaaatatttattttagagtaatttagacttttagaaaggttgtagctgggcgcagtggctaacgcctgtaatcccagcactttgggaggccgagacaggtagatcacctgaggttgggcgtttgagaccagcctgggcaacatggtgaaaccccgtctctactgaaaatacgaaattagtcaggtatggtggcacgcgcctgtagtctcagctactcgggaggctgaggcaggagaattgcttgaacccaggaggcggaggttgcagtgagctgagatcgcgccactgcactccagcctgggtgacagagtgagactccatctcaaaaaaaaaaaagaaaagaaaaaaaagaaaggttataaatatattataaagagttcccacatacccttcacccagtttctcctgttgtttgtatcttatattatcaccatatgcttgtcaatgctaaggaattgctgggtgcagagtggcacatggctgcagtcccagatactcaggaggccaaggcaggaggatatcgcttgagcccaggagttcaagtctagcctgggcaacacagtgagacctcttttctgcaaaagaaaacaaataaaacatctaaaaaagaatacactggaggcggcgtggaaacaaggatctcatttgggagttgtctgcaatgttctgagcaagcagtaacggaggcctcaagtcagggctgtggtcatggaggtggggaggggtggttggtttcactatctgtgttgacttaattttagatttgcagactcaactgagtatgaactttaagagaaagagagaggccaggcacggtgggtcacacctgtaatcccagcactttaggaggccaagtggggaaggccgcttgagcccaggagtttgacaccagcctgggcaacatagtgagacccctgtctctacaaaaaaaaatttttaaattagccaggcagggtgatgtgtccctgtaatcccagctactcaggacagtgaagcaggaggatcatttgagcccagaaagttgaggctgtagtgagctgtagttgcaccattgtgcttcagcctgggagacaaagtgagaccctgtctcaaaaaggagaatggggagagagagagagagagagaaggagaaagagagagaaagagagagagggaagtcaaggagaaccccacattttttgacatggtgtattagtctcttctcacactgctaataaagacatacctgagactgggtaatttataaaggaaagaggtttaatgcactcacagttccacatggctggggaggcctcacaaccatggcagaaggcaaaggagaagtaaaggcatgtcttacatggcagcaggcaagagagcttgtgccatttataaaaccatcagatctcatgagacttattcactaccacaagaacagtatgggggaaactgcccccatgattcagttatctccacctggcgccgcccttgacacgtggggattattacaattcaagttgagatttgggtgggaacacagccaaaccctatcacatgggcaagtgaaaggatgggtttgccatcaaataaaatggggaaggagactgactaggtgggcagattaggaactcagctttctatgaagtgcctactgatggatagagatattgtgttggccatctattaggttggtgcaaaagtaattgcggttttgccattaaaagtaatggcaaaggaaataacctttgcaccagcctaataggaattggagtctaaaattcaaaaaaggtaagtcagagctggagatccaaaggcaggagtcagcctcctgtggaggctatttaaggaactgaataagggcatagatgcaggagagcacccaggactgagcccagggcttactctccatcattaaagaggttggggaagatgaggaggagccagcagagaagactgaattggagcaaatcagaagaatgtgggtgctggctgtcatgcaaggaaagtgctaagccatttcaagtatgagggaatgatcaatgatgtccactgatgctgatgtgttgactcaaatgaaaaatgagaatcaaccattggatgtagtggcatggagatctttcgtgacctgagccagagctgcttaggtgaagaggtgaaggcaagaggctactggaaggattactactagctcttttaaagagttctgctgtgaagggtagaggaagagagatggggcatgtgttagctggtgggggaagtggatttcagaggtttgtttcccttaaaaaaaaaaaaaaaaagaaaaaagaataaagaaaaaaaaaaggccaggcacaatgactcacacctgtaatcccagcattttgggaggctgagacctcgggaatttgagactagcctggacaacatagtgagaccccatctctacaaaaaaaatttttttttaattagctgggcatggtggtgcatgcctgtggtcctagctacttgggaggctgaggtgagaggatctcttgagcctgggaggtcgaggctgcagtgagctatgatcacaccactgcactccaggctggacaacagagcaagaccctgtctcaaaaaaaaaagatgggagacctaacagcagattttatgctgataggaataacctattaggggagaaaaacatgaggatgctggaggaagaagagtgtcaggaggacatctcttggtggacgagaggggatggcatttggtgtacaggtggaaggtttcactttagatgacagcacacacagttatctatagaaacaggagaaaatgcactatatgggcatacatgctgggaggtagagagtaaataatagtggtggttgcttgtggaaattctcttctaatgtttttatatttttatggtttatcaaggacaatttatatttttacagtttactgcaaacaacaagttctaatttattcaataattatttgtgggtagaccgagtgcagtggtgcatgcctgtaatcctagcactttgggaagccaaggtgggaggattgcttgaactcctgattcacttctgagcttgaatcaggagttcgagatcagcctaagcaacatggcaaaacactgtctctacacaaaatacaaaaactagccaggtatagtggcatgcacgtagtcccagctattcgggaggctaaaacgggaggatcatttgagccctgaaggtggaggttgcagtgagccaagagcgagccactgcactccagcctgggtgatagaataagaccctgcctcaaaaagaaattcttattcttcttcttcttattattatttgaggagacatttactttgtaccaggcgctgtgctagatgctggagatacagacatcaacaatgacaaggctaagtgcctggcgtatttgtactttgagtctaataaaagacatcacacagacacacaacacacacacacacacacacaggattgtcaaaggatcaaccatttcacatgtcaagatcaggaatgatattggtctactactgccttaccatatctcctaccatgacctcatcttcctcttgccagattttaagtctttatacctcaactcccagaactctcttcgcctcacaccctatcacaatgtcatccgtaccccacggccaatactccatcattcgggaaagcaaagttccaaagcgtcaagattgtatcaatggacctgtctctatggcaacagtcctgaatgagccaagcaaggtaaccctggagatggcgtgaatgagaaagtggcctgttgccacggagacgtgctgaatgggaaggcccccacgagccaggctatgtcacgaagccgaaacagtcagcatgaagtcggtatgtctattttcaactcggaattacaaaaatacattttaatagagctcatgacccatctccttcctcgtccctgcctcccaccccactcttcagccttcatcctacaacacaatcgagcctcaccaggaacccttcaaacccctcaaggacaccttactgttccttcagtacacagtccccttcctgggctgaggtggtattcctttgaccaactactgtctcccctttgggaccaacagtattctcaaaagccatgagcttatgggaagaacattaactacattctttggggcaagaacagttgctcacctgtgaaccagctcagcttgcatctgtgagaatgattgcaatgggtagaccagttctccatcaaagaatggccctagcaccccacacacagtggtataatctgatcatgctggtgtattgaacatataatgttagtgccacatgaaaggaatttgtaaaaggacttagtgcctagaaaggtacctttgaagatcttggaatctctgaaacttacccaggttccttataccctgctcaaagtattcctccatttatttcttcattcattagttcttttgtttcaccacatatatatttttgaaacggggtctcactctgttgcccaggctagagtgcagtggcaagatcgtggctcactgcagcctcaacctccccatctcaagcagtcctcccacctcagcttcctgagtagctgggacaccacaggtacaagccaccacgccaggctaattcttgtaatttttgtagagacggggttttgccatgttgcccagtgtattcgtttgttctcacattgctataaagaactacctgagactgagtagtttataaagaaaagaggtttaattgactcacggctccacaggctgtgcggaaggcatggctgaggaggccacaggaaacttgcaatcatggcggaaaatgaaggggaaacaagcacatcttcacatggtggcaggagagagagagtgagggggggagtgctacaaaaccaggtctcacgagaactcactcactgtcatgagaaaagcaagggggaaatctgctcccaggatccaatcacctcctaccaggtccctcccccaacattggggattacaattcaacatgagatctgggtggggacacagagccaaaccatatcacccaggctggtctctaactcctgagctcaagcaatctgcctgccttggcctcccaaagtgctaggattacagacgtgaaccatatttattaagcattgttacagcaaagagaagcattgttgcagcataacaattggaagactccattgatggacgtctccatcaacaagaactgtcggataaactatggtacacccatcccttagcgtgttatgaagtcattacaaaaagaagaagcagatctctgagtgtcaataagagctagtacttatagggtgtctactgtatacaagtgctgttagaaagtgagtattaactcatttaattcttgtaacaagcctgtgaggtggattctttcatatccccattttacagagaaggaaataggaatctctatatccaagatatgttatcaggtgacaaaagcagtttttgaatggtgccgccattttctcgtaagagcaaatctggaagattccatgagaaattaataattgtgtttgcctctgtagcggcaccctgaaagatttggaagtaggtgtggaaaggaaacttactttcttgtgtctttctgaattttgtactgtctacgcgttttgtctttcacaaaaccaaacagaaaatgaccatttggtgcattttgtgtgtcaggcattcttctagtctagagaagcacaggagagcaaaatattttactgacgagaaaaatgaggcatggagaagttaagtgacttgcccaggtagcagagctgggattccacatcatagggtttatacaggaaacaggtaaacagagctgtgcttgtgtgtgggtatgtgtgtacacatgcatacatgtgtgcatgtgtgtgtgtgtttgtgtgtgtgtgaatgtgcttgtgtgttgggagagggaaatggcaagagaagaacctacagaaggtcagcaggaaccaacccatgttttgaggagtttggactttatcctgaaggcacaagggagccatggaaggatttagacaaggggtggttgtgcttagctttttatttagaaggatgactctggctgaagggtgatggcccagaatacaggtatatgtgaaggactcctcctgccctagtaggaggatgcccacccaccctctctgcccagtgcagtatcaaagggcaaattgggtacagagaattctcaccaagctgggtagaatccactctgatgctggggagtggacactgaatgcaccagcctctcctcctgctcaatccctgaattgaagctgttccactaatgttagggatcagattcccttcatatatatatatatatatatatatatatatatatatatatatatataattttttttttgagacagagtctccctctgtcacccaggctgaagcccattgtcgcgatcttggctcactgcaacctccacctcccaggttcaagcaactcttgttcctcagactcccaagtagctgcgattacaggcacccgccaccacacctggctaattctatatttttagtagagacagggattcacctatgttggccaggctggtcttgagctcctgggctcaagtgatcagtctgcctcagcctcccaaagtgctagtattacaggcatgagccaccatgcccgtcctttttatattacctttttttatagagatgtggtttcactatgttgaccaggcaggtcttaaactcctggcctcaagcgatcctccctcctcagcctcccaaaatgctaggattacaggtgtgagccactgcatctgtccagactctgttctccataaagctggcatatggaaagagggaagaccatccaggcaatatcgaagtcccattggtgctgatgtggctgctgagaccacatgaatggatgcattctgactctgccacctctcagctatgtgaccctgggccagtcagcaagtccctctataactcagttttctcatctgtaaaatggcgtcaacagtagccaaccccagcaaatactgtgaaatatacagaacatcattataatggtgaggatgatagagatgctatgttatcagaatacctgggcttgaaccagctccccttcttgcaagctgtgtgacttggagctgatgcccaaacctctgtgggcctcatttgtttcatctgttcaatggggataataacactcttacttcatacagttatggaggatttattgaaataattgacatacagctcttagaacagtatccggctccttgtaagcgctcaagaaatattacagactgttgataataatgcaatactactaccaataatatggccaggagcaatggctcacacctgtaatcccagcactttaggaggcagaagcaggctgattgcttgagcacgggagttcgaggccagcctgggtaacatagggagactctgtctttacaaaaaataaaaataaaaatacaaataattagccaggtatggtggtgcatacctgtagttccagctacttgggaggctgaggtgggaggattgcttgagcccaggaagttgaggctacagtgagctgtgatcacaccactgcactccagccagggcaacagagtgagaccctatctcaaaaataataataatggccgggcgcgctggctcatacctgtaatcccagcactttgggaggccaaggcgggcagatcacttgaggtcaggagtttgagaccagcctggccaacatggtgaaaccccatctactaaaaacacaaaaattagccgggtgtggtggcggggtgcctgtaatcccagccactcaggaggctgaggcaggagaatcgcttgaacccgggaggtggaagttgcagtgagccgagatcacaccactgcactccagcctaggtgacacagtgagactccatctcaaataataatatgagtaataataataatatcatttttatcatcattcttactaacagtctctcactccttgccctgcagttttgcctgttttcttggaataacactcttccacacctttcccctcagggatggttcacgtttagcatcatgacccacccctggggattagttagctcatttctggaaagcactttggagctgtaggtgctttgcaggctggaaacatcacgggacttgtaccatatttaagcaatgccagattattctgcctggcagggggaggacacagaggatacggccctggtatcttttctccctgcctacctcagctttgctctgaaccattttctgtcctgttcagggcagcctgggccacttgccacttccagctttctcgggagaggatgccttcctgatggcacgcctcttaacacacacctggtgctgttgttgaaaaagcaacaattgactccagcgccagcactgagaggcttgtccttaaaattagcaggagctgttggaaggtcgctgttagctcttttgactggaacacactgttccccaggtggcatgaggctgaatacagtgcagggattggctctgctctcaggtggcctgctccacgctcctgagctccgggtggaagctgtgaccattatttccttaacagaaacatatatagcagcattaactatgaaccttattactgtgtgtgtgtgtgtgtatatgtgtatatatatatatgcacatatgtgcatatgtgtgcctatgaacctgttctgagcactttacaaatgtcaatgtattttatcctcccaacaacccattttataaataagacttgaggcacagagaggttacgttactgccccaagatcacacagctggagagtggtgaggccaagatttgaacatatgtaccattgtaccatatgtaccaactttttttttctttttgggatgcattcttgctctgtcacccaggctggagagcagtggcatgaccacggctcattacaacctcaacctccaggttcaagctatcctcccacctcagcctctcaagtagctaggaccacaggtgcataccaccatgcccagctaatttaaagtttttttttgtttgtttgtttgtttgtttgcagagatggggtctccttatattacccaggctggtctagaactcctaggttcaagcaatccccccacctcggccttccaacatgctgggattacaggcatgagccactgcacccaggtcctccctccttataaaggtcgccaagcacaatcttgtgagcctggccctatccacacccatacgcaacatggtgtgtatttttcaaacaaaaactgaatgaacacctctggtttgggttcccctcacacttgtcccgggtttgttgactctgtgttgtgggcctagacaaagcagtgtctggagctcctagacccagggaccagacagtctgggttcaaatcctggctcttccacttctgcctgagtgctctctctgaacctgtctttctttatctataaaatggagataatttttttaaactcatcacttggtcaaactgctttgagcatgcaaatgagttcatatgtataaacctcttagaatgtcccaggcaaagaacaacacttcactcagatcaacatttatttagcatctactgtgtacccatgactattctaggtgatgaggagaccctctggttcttatgaggtagtgaggtgggggagggtgagaaccctaaacattaacgatggtgtgttcgcaggtgggaaaatcagtaaagtcgggtaaagggaatttgggagtgctgtgctcaagtcctggccctgccactttctggggtgcaagatacagcattgaatagggtggtcagggtaggccttattgggaaagtgatatttgagcagacgatctagatgtcggcacatattgctactgtttgatggtactaatatgagtttgagtttcacttgcaagtatatatatatatatatatatatatatatatatatatatatatgtgtgtgtgtgtgtgtatatatatatgtgtatatatatgtatatatatgtgtgtatatatgtatatatatatgtgtgtatatatgtatatatatgtatatatatgtatatatatgtgtgtatatatatgtgtatatatatgtatatatatatatgaaatttggtccatttatttatgctgatcaattaattgatgttgaaattataattgaatgttttattaataaacagatacccacatactattttttcagaaattgttaggttttggggttttctttagattttgattatttttatttgcttaattttcttttttcttttttttaattttatttttccataagttattggggtacaggtggtatttggttgcatgagtaagttcttcagtggagatttgtgagaacctggtgcacccatcacccgggcagtatacactgcaccatatttgttgtctgttatccagtgctcacctcctactcttccccccaagtctctaaagtccattgtaccattattttactcacccacattctttggcctgagatgctgagtggtcatgactcccagatcccttcttgtttctgtatcaaagatctttactaagatcctggcctagggaacctattccctttcctcatccccaatgggagaaggggcttcttccccagcttatttgccaactcataggaaaggtatgaaggagaggactgtagttgtcttgaagctggtcagatgttgaagagatgataatatttgctgatcaagagagacaaagcaatgctggaagaagaggctgtgttagttaacaccagctgcaataaccaataaaaccaaaaatctctggcttaagagtatgcatgagtgagaaatcaacttctaaagtacaactggtggccggatgtggtggcttatgcctgtaattctagcactttgggaggctgtggtgggagggtcgcttgaccccagtagtttaacgccaacctgggcaacacagtgagacaccatctctactaaaaataaaaaataataaagtgaaactggtgaggggtgcaatgaggtggagtggtgggtgactcaaatatggctcgactccatgcagtcactcagggatccaggctgttggaggctctccctgcttaaacatgtggcttccaaggttgttctaagagcctacattgagacagcagctggggaaaagggaaagtggagtgggaggtacttatgagggttcctggaagtggtgaacaacacttctgcctgcattctattgggtggaatttagtcatgtggcccaggctagctgcatgggaggctgggaaatgtagtctctgattaggctgccatttcccagtcccacttgtgaatctttagtgggaagctcaccatgtttgcaccagggattcagtctacctcccactcatgcctcaactatgtatcaggcactgtcgtaagtactttacatatcagcctacctaatgcaaacaactactcagtgggtgctttattggtcacatgtattagtgagaacatggaaacccagagccgttaaatatcttgcccaaggtcacacagctaggaagtggcagagttggaatttgaatccaggaaatctggctgcagagccccacgcttagtataaattcattgtagtttagaaagaggcagaaggaccctaaaattggcataatccattttttggtccctaaggaactgactgaattgactacttgtaaaagtgagtcctggacaggcaacagtggctcaggtctgtaattccaggactttgggaggctgaggcgggcagatcacctgaggtcaggatttcaagaccagcctggccaacatggcaaaaccctgtctctaaaaaaatagaaaaattagctgggtgtggcggtgggtgcctgtaattccagctactcaggaggctgaggcaggagaatcgtttgaacctgggaggtggaggttgcagtgagcaaagatcacgccactttactccaacttgaatgacagagcaagactctgcctcaggaccgccatggccccctgggttctaggtcagagtttctccgccacagcactgatgactttgggggctgcattattagctccaaaatgggagctatcctgtgcactgcctcaacttacttgatgccagtagcgcccgcgccccagttgtgagaaccaaaaatgtctccacacattgccaaatgtcccctgggaggtgaaatcacccctggttgagagtcactgttctagattgttaaatattatcttacactctagcacaagtccaaggcaaactgacttagaaattaccaaccttgcaaaaaatagaagatttcttaaagtcagtgagcatgatggtggcaagctgctgaaatcacacccccagacattagcagatgggatctggacagtattcatctagttaaaaattgacaaggactgggacactgcaggctcttcaaaagagaatcatttgaataacaaggggtcaagacaggggtaattggtgaaagcccctgctcataatttgaaaatataaataggcatcatgaaaattcatcctgcaaaagtcaaaagtcgaatgtgcagtgttatacatgatcagttgatttgggaggggaaattgcatgcacacacatgagagcttgcacacccacacacacacacctgttcaagtgtgtgtgccagtgctcagtgaggaccatctccccaacctgtctgatcatcttgctttggggtgaccctatgggtgaggcagaaattcttggatcatagttttctaatgaatattataattgttaacttctgatgggtgctgactttttcatctttgcaacactgcgtaggtatttttactctccccattttacagatgagacaactgaggctcagaaagattgattagctctacacgaagccaggatccaggcttagcctggctccaggaatcatgttttgagttacgtagcttccctgattctgagggacctccccacttctgaaatcttctactgttactccccatggccctttcctattgaccggaggcaccccagctcctcactcgtcccttatcttatgaaacatgaccatgatgtctgaattcaaaggagagcctgggctttgtggggaaaacgaagcagaaaaagaaaggtggaggttggtggttgtttttggcatggtgaggagcctgtcgttgcttgaggaaagcaagaaaggagattgctggggcttggatccatctctgggtgcctgtgggtctgtctgtaaaaatgagaactggtcgtgctcattagaggatttgaccgttaggccttgggatagcgatttgggaacttttttctgctaagacaaagaataatatggttcaggttcattttgctcctgctttcccaagccctacatctcttctgggcttttttttttttccttttctctccttcttcttcttcttcttcttcttcttctcatttttggatctggacttctgctgactcatctctctgagcaaggaaggagggaggaagtcagaattgctcattaaccgttttctttagtgactcagctgtgattcacattttaattaatggaggagaaaaacctgatcagtcctaaggcatctgcccaatcacgcataactccaggctggtgataataataatacttgaaaaaagtggggtgtcctgaattaaactatggctcattccccacattagtcttgaggactccaccaggccctctaagttccaggtctcaatggggctccctgaaccagagcagctagtccaagccccgagcagcatttctgcagagttagtctgaggtcaggacaagaaacagaggctcaagccctcctgggatcgcaggaggatcatgggaatgtaatattgtttcctgagctggtctttggctataatcccaggctcaagcctggcctccctcccctcggggcctgaaatttgtcagagcctattgcaggggcagcttctgtgctttttgtttgcccagagaatgagaaaagtccagataatcatgaccgctacttcctgagcacttactatgcatcaggtggtgtgctcagcacttctcatgaatgatcacgttgaatcctcactctgtccacaaaaagaaagagcttttatataattctccaacctccctatgaggaaactgaggcttggcaattgcccaatgtagacaattagtaaataatcaggcaggatataaacccaaccctttcccacctgggagccagagcttgcatctactatacttctctgctttccagtcagctgcaaagaaaaattggaagctgatagctcattcaacaaacacttattgaacccttccacctgctcagccctgttctagacaccagagatccatcagtgaaccaaagaggcaaatccatggtctcatgaaactgacaatttacctgcccaagtgtattagttactgtttataagttcctattaagtgtattagatatgcttgcagctgtaacaaagaatcccaacatgcataagggctcaaaacaataaaaatttcgttcttgcacagataaagttcaaaaggtgtattctttttttttttttcttttgcgacggagttttgctcttatcctccaggcatgagtgcaatggcccagtctcggctcactgcaacctccacctcctgggttcaagcattctcctgactcagcctccccagtagctggaattacaggtgcccgccaccacacctggctaattttttgtatttttagtataggtggggtttcaccatgttggtcaggctggtcttaaactcctgacctcaggtgacccacctgcctcggcctcccaaagtgctgggattacagccgtgagccaccgtgcctggccaaaaaaaaaatgtattcttaaacagcaggcacctctcctctaagcagtaagtcaggggcccaggcttgttccatattgtagctcctcatcttcaacccatggcttccaaagtctccatgcttcttgatatcaagccacagaagggaaaagagcatgagaagggcacaggagaaatgtttctgggacagacccagaagtagtccatatgacttccatctacctcccactggctagagcttacatggcggcacccacttgcagagctgggaaatggagtctaactgagcatccaggaaggagagacagacatgagtctttgcgtgggtcctcactgagaatcaagctccacattttgatcgatgtcaccagagcgtacatggcggcgcccacttgcagagctgggaaacggagtctaactgagcatccaggaaggagagacagacatcagtctctgcgtgggtcctcactgagaatcaagcttcacattttgatctgtgtcacctccttgcaagccctaccttaggacaattttaagggacattcctatcttcttccacccttaggacagttttaagggacactcctgagttcttccacccacctcctctgtttcttgggcttccagctctcaggatttgcctttgccttacaatggggtgaagcaagaatctggaagaatgtctctccccacaatttgaagtcttatttgaaaaaaagcagtagagcatccctccctcttgaggtagggaaatctagaatcaaatcctgcttctccagactttgacctcagaaactggggggacttcaaggtcttcaggtgggcagctttcatgaaccattcattcctcccacctcataccaatcagggtcctaacaggaaaaagaattaacttctagatggttcaaaagaagaccatgccatgaagagactccttaaagagataggaacaggtgagagaaatagataacggctgtttgaggtcctcagagagaagccatcgcgagccctacatttcctggaacccagtggaggcagagctgtgcagaagggactactgtcagaaccagggagggagcagggaagcaatattccaatctctttccctcccctcatcttctgccagcgcttcccctcagccaaaccaaaccggaaacggagcaaagcattctgggagttgtagtcttcaagggtccgcctcgagggcacagagcccgctggagcattgacctagagggcacacagggaatgactagtttgcaccatcatgtgacggactgcacgccctcgattatgtaatccactctataattcaactgcagagctgcatggtacagcaggatagccactagccacacgaggctatttaaatataaatgtacattcattaaaatttaaccaaatgaaaattttagccactgagccccatttcaaatgctcattagccacacgtggctcttggctaccatattggacagatcagaatagaacatttccatcatcccagaaagttctaggggccggcgcagctgtggtgtaacctgagcccatgcatgttatggaatggagaagagagaaaacagcacaagaggcagttttgaagggagacagagagctgtggatcagtagggaggagactctctaggcaaaggagcagttgagaagcaagaaagttgagtgagctgctttgctgcgatggaggcttccctcacggggaagagtagagtcagaaagctttagttcaagttcagctctgaaatgaaccaatgagtgttctgacaagacacctggccttccggaaccttggttttgtagtggccaagggcttgaccctctgaaggttcactgaaaaaaatcaactcacaaggcatattaattggagaaaaggcaggcagatttatttaatgtgtttgcacgagagccttcagaatgaagacccaaagctgcaggggaaattgtccgttttttaagcttaggttcaacaaagtatggacagcggtgtagaaatatgattgaacaaaaagtgtacaatgtaaatgctaatagactgagtggggaaacccaaaaagggctgtcttgattctccttggtctctctgagcatgcatttcttccgggtatgggacaagaccctctctggaatggagggggggctctcttggttctccttggtctctctcagcatgcattccttccgggtatggggcaggaccctctctggaataagggggctgtcttgattcttcttggtctctcagagcatgcattccttctgggtatggggcaggaccctctctggaatgggatccttataacctacggtcaaataacgtaagttagataatttcttttttttttttttcttttttttgagacagagtctgattctgttgcccaggctagagtacagtggcacaatctcggctcactgcagcctctgccttctgggttcaaatgattctcctgcctcagcctcccaagtagctgggactacaggtaagcaccaccatgcccagctaatttttgtattttttagtagagacagggtttcaccatgttggccaggctggtctcaaactgctgacctcaagtgatccaccacctgggcctcccaaagtcctgggatttgtaatcccagcatgagccactgtgcccagccagatcatttctttttctttttctttttcttttctttttttttttttttttgagatggagtctcactctgttgcccaggctggagtgctgtggtgcaaactcagctcactgcagcctctgcctcctgggttcaagcaattctcctgcctcagccttccaagtagctgggactagaggtgcgcgccaccatgcccagctaatttttgtatttttagtagagacagtgttttgccatgttggccaggctggtcttaaactcctgacctcaagtgatccacccacgtcggcctcccaaagtcccgggatttgtaatcccagcatgagctaccacagctggccagataatttttttataactagtttttacaaagaaaggtggagggaaagttagagtaacatttttaggtgttagggctgactttggggaaaagaggtctggtttctacgacccgccttagggaagagggattctagtttttgtggctagccccaggggagaatgggactaagagatagaagggcaggagaaggtcagagaaaaacttttgcttctgtggctgcttcggagaacttcattttggggtattgttttctgagccccaacagtttgcttatcagtgaagtgggtataggcgcccacctcccacagtgacgatgctgtgaacagggctttggaagagtagaactatgaaatatttgttgttgccttgtggggaaatggtcgttaaagccaaaattgttcaagagaagaagcaggaagagttcctttctttcctgcaggtatcctcttaagctgagtcttcagaatcccctgacaacgtttaatcaacactttattaaattcaccccaaccctgcttcaaaccttcacctggtcctcgagatcttccaactgtttcttgatgaagttagcaggcaattgtatggcgggatcatcatctcatgttttgttttgtttttttcctttttaccctctgactttgagaaatccttgtccttttacttttccaaacctgagagcattgcagagaagttagaattgagcaggacatgggcttaagacccagcccagccatgtgctagctgtgtgaactcgaagcagtgaccccacctctctgacctggaaagtagagggaatgataggacccaccaccgccacacttgtagggtcatcatggggattgaataaaataatgcataagacttggcccacagcaagcactcaagaaatgttagctacttcctaaatatatttttaaccttttattgaatataacatacatacagaaaagcacatgtatcatacaagtagagcttgagtgattttcaaaaactgagcccagtcatgtaaccagcgcctagttcaagaaacagaacatagccgagtgaggctgaggcaggagaatcacttgaatctgggaggcagaggttgcagtgagcagagatcatgctatcgctccccagcgtgggcaatgggggcggaggggaagagagagagagagagagagagagagaggaaggagggagggaaggaaggaaggaaggagggagggagggagggaagggaaggaaggggagagagagaaaaggaaagaaaagaggaagacagaaagagagagagaaaggtaaagaaagaaaaggaaagaaagagaaagaaagaaaagaggaagacagagaaagaaagagaaagctaaagaaagaaaaaaaggaaggaaggaaaatagggagggaagaggaggaggaagaagaagaagaagggggggagggagggaacagctgcagcttcgaggaaggaaggagggagggaaggaaggaaggaaaggaaggaaggaaaaaaaaacagcaccaacgtttagaaacccccttgtgcctctgaggtcaccagtaactccatcctgacttcaaacagtctagattagttttgcttgtttttgaactttaagcacatggggtcatacagcatgcatgcattgacttctttcccttgacgttgtatgtgtgagattcatctgtgctgttgctgttcatttgttctcatcgctgtgtgtgctgaaccacctgttcatttactctactaatggtgggcagtttggtgctttctactttggggctattccagagaaagctactttgaacacactcagatatgtctgtgggtgaccactcttcatatttctatgggagatattcctaggaccggaacatctgagtcagagggaggaattggtttagctttggtaggaactgcctaacaattggccgggcacagtggctcatgcctgtaatcccagcactttgggaggctgaggggggcaaatcacttgagctcaggagttcgagaccagcctggccaatgtggcaaaacccctggccaacatggcaaaaccccgtctccgcaaaaaaatacaaagattagccgagcatggtggcgtgtgcctgtaatctcagctactcaggaaactgaggcaggagaattgcttgaacctgggaggcagaggttgcagtgagcagagattgcactactgtactccagcctgggtggcagaatacatgaaactccatctcaaaaagaagaaaggaaggaaggaagggaaggaaggaaaggaaactgcccaacagttttcccaagtgtttgggatggaaggaaggaaggaaggaaggaaaagaaactgcctaacagttttcccaagtggttggaccagttaaaactcccaccacctgtgaatgagagtttgtttttattttgctcctggagtgcctctcctgtagcaggttcccactgaatgtctgggaattcaaatgtaatgcacttgttcatttcctcaagagcttcactccatcaattggattcatccattggctctcccatctccactgacactatgttctcacctctatttggaagacatcctgcctccacctgcccaagtcacattatcttctcattccagcctctcaaggagagttttctctttcaccacctcctctagccctggtgattggcaaggtctcgcaacagtacccttcaaaacactcatgactgtgaatgcactggccttcactaagtttcccattcttctctttctttcttttttcttttcttttctttttttttgaacagagtttcactcttgttgaccaggctcgagtgcagtggcacaaacacagctcactgtagcctcaacctcctgagctcaaggtatcgtcctgcctcagcctccttagtagctgggaccacagacatgcaacgttgtgcccagctgattttcttttttttctttttttttttttttttgagacatggtctcaccctgtcaaccaagtgcagtagcatgatcacagctcactgcagccttgacctcccgggctcatgcgattctcccacctcagcctcccgagtagctggggctacaggcacaagccaccatgcctggctaatttttgtacttcttgtagagaccaggtttcaccatgttgcccaggctggtcttgaactcttgggctcaagcagtcctcctgcctcagcctcccaaaatgctgggattacaggtgtgagccagcacgcccggccatggctaatttcttcatttttggtaaagacaggtctcactttgttgcctaggctggtcttgaactcctggactcaagcaatcctcctgtctcagcctcccaaagtgctaggactaccgatgtgagccaccgcacccggcaatttccccttcttgacttctccagagctctcatccctctcgagctcctgtctcttctagaatcacttacctcaccaccttatggggtttttgcctctgttcctactcctctttatttaagaaaacactgtactttaagagggcttcagaaaccacccgaaatagaaacatgtccttttgttcaatcctttactttaaaagacaaataaaatgaagaattgctctccatgtagaaggttaaggagcttgggaggaccttctgtgagtggggagaactttacattaaaggaaaaaaaatgctggagaatagctgtgaacccaggaagggagaaggacttcctccactgaacttgtaaagcacaaactctaaggcaaaaaaagacatgattacatgaaaactaagatatttgttcaaataaagatgcaattggggccaggtgcggtggctcacgcctgtaatcccagcactttgggaggccgaggcaggcgaatcacgaggtcaggagatcgagaccatcttggtcaacatggtgaaaccccatctctactaaaatacaaaaaattagccaggaatggtgtcacgtgcctgtaatcccagctacttgggaggcttaggcaggggaattgcttgaaccagggaggtggaggttgcagtgagctgaaatcacgccactgcactccagtctagcgacaaagcaagactccgtccaaaaaaaaaagatgcaatagcaggtggttcgggaaccaaaccttacatccagatgctggttgtcccatttcctgtgaatccttgggtgagttatcaacctctctgagcctcagtttcctcgtcaataaaatggagaaaatagtatctacctatggaattgttgtgagttttgaatgagttaatatttataaatcatttagaataggaattagcacatggtaaatagtggatagaatcataaaaaaaaaattgatcaggggttaacttctaactgctgtttgttatagaggtccctagcactgtgtggtcattttaaatttagatgatttagaattaaatgaaatttaaaactcagttcttcattcacactagccacattttaagtgctcaaaacccacaggtgactagtggctaccatatttggcagcacagattgagaacagatttatcatccagaaagttctgtcagacagtgttgatcaaggctacatgagggtctgggtgcagtggctcacacctgtaatcccagtgctttggaaggccaaggtgggaggatcactggaggccaggggtttgagaccagcctgggaaacagagagacctcatctctaccaacattttaagaattagccaggcaaagtgttgcatgcctgtagtcccagctactcaggaggctgagacaggattgcttgagcccaggaatttgaggctgcagtgaactatgagcgcaccgctgcactccagtctgggtgacagagtgagacctgtctctaaacataaaaaataaaaatgtaggtggggcatagtggctcccgcctgtaatcccagcactttgggaagccgagatgggcagattgtgaggtcaggagatcgagaccaccctggctaacatggtaaaaccgcgtccgtactaaaaataaaaaaaaattagccaggcatggtggcgcatgcctgtagtcccagctactcgagaggctgaggcaggagaattgcttgaacctgggaagcagaggttgcagtgagctgagattgcgccactgcactccggcctgggcgacagagcgagactctgtctcaaaataaataaataaataaataataataaagtaaaaataaaaatgcaaagactacctgagggaatgtctgcaagtcaaccagaataacacagcaaccccaataggaaaacaggccgaaaatgtgaacaggcggatcagggaagtgaagtctgaaaagctaatcagcctatgacatggtactcaaagtcatttgtaaccagaaagatggaaatgaaagcagtatctctgtacacctttaatattggggaaaaaatatgtgaataagccaagggtttccagcgatgcgggcacagaggaaagtcttgcaccactcaaaggggtgtggcccagggaggccactctggagacatatcggtagtactcagtccagtgaggtccagcaccatcagcgcttatgtccccaggcatccatcccagggacattcttaccaggtctgttaggggcaggtacgagaatgcttactccagcaccatctatataaggggagctgaaggccacctggtgtccctcctggagaccaggaggcggcatgtgacagcggcacccatggagcaccagaatgagtgagagctccagaccgcatatccgacagatactacgggatggggcttttagaaatatggttgttgccgggcacggtggctcatgcgtgtcatcccagcactctggcaggccaaggcgggtggatcacctgaggtcaggagttcgagaccagcctggccaacatggtgaaaccctgtctctattaaagatacaaaaattagctggacgtggtggcgggtgcctgtaatcccaactactcgggaggctgaggcaagagaatcgcttgaacccaggaggcagaggttgcagtgagccgacatcgtgccactgcactccagcctgggtgacaagagcaaaactctgtctcaaaaaatttaaaaaacaaaaaataaaaatatggttctgggtgaaaacaggaaacaacagaatgtgtctaacttcatcctgcttatgtcagttaaaaatagacacactcaaaatatcgcacgtgtttttgcgagaatgcactcctataaggccaaattaaacattctctcagttgtctctgggagggagaagaatgaaagtagggtatagagagatataggggaattaatgcatgaatgaatgaaggtataaacaagagacaggcgtcatacagaccaaaggtaaagatatcccgtaacctgaggagagcaaagaacttgactctgcatttgaagattcagaaaatgaatttcagaaatagttttctcgccagggggtggctcacgcctgtaaccccaccactttgcgagggcgaggcaggtggatcacttaaggtcaggagttcgagaccagcctggccaacatgatgaaaccctgtctctactaaaaatacaaaaattagccaggcatggtggcatgtgcctgtaatcccagctactcaggaggctgaggcaggaaaatcacttgaacccgggaggcagaggttgcattgagctgagatcacaccattgcactccagcctgggtgacagagcaagactttgtctcaaaaaaaaaaaaaaaaaaaaaaaaaaaagaagaggaagaaatcgttttttcaagaaggggaaagctgggtgatttaagaatgaacttgaagaggatcactcagtcctcaacctaggagtggcaagaatatagactgtatgggaagtggttctgctccttggtacccatcttagaaatatttggcctgagtctgtaagaggcaggtactttatctaacctgaggttagggggccactacatccccatcccctcccctgctttctaaccatgctaacatcttctcactctcctgtctcctctccttctcactcccctaatctgcctattcacattttgggcctgttttcctattggggttgctgtgttattctcactgatttgcagacattcctctgtgtcatctttttaattttgttttaatttttagaggcaggatgtcattctgttgcactggctgtagtgacgtagctcactgcagcctcaaactcttgggctcaaactcctgtcctctgcctccacttctcaactggtaacctcacttctcttcatgaggtctctccagccccagggcctttgcacatgttcccctctcttctgagtggcatatggtagttgctcctctgtaaatatttattgacatcctgacttccaaccagcagagaattgacctccttcccatgctcaggctagtgaaggcatgagtttggctgaggtcccagtggggaaggtgagtggggtggcagagttaaccaggagcagcatggtagaatgggtaaaaccagacgtagcacgcaggcaccacatgttagctggacaagtagtttaaccccatgggtctcaatttccccatcaatgaaagggagaatagaacaagtccctggtaagcagcataaaatgagctctcagaatgtaaagtaacaagcacacaacctggaagagaatacatttagtgaatattggctcctttaatcagcaggttctgatatgacttagctacaattaagaaaataaaaatggaggccgggcgcagtggctcatgcctgtaatcccagcactttgggaggccaagacgggtggggtggatcacctgaggtcaggagtttgagaacaggctggccaacatggtgaaccccatctctactaaaaatacaaaaattagccaggcgtggtggcgcacgcctgtagtcccagctactcgggaggctgaggcaggagaaacatttgaacccaggaggtggaagttgcagtgagcccagattgcaccactgaactccagcctgggcgacagagtgagatttgtctcaaaaacaaaagaagtctggaggccaggaggttggttgcagggttggttccttggctcaacaatgtctccaaagagtccttccatctttccactctaacatcgtcactgtaaggactttttttaacatttaccactcacagccccaagacgactgcgtcagttctttctttttttccttcagacagagtcccgctctgtcgcccaggctggagtgcagtggcatgatctcggctcactgcaacctctgcctcctgggttcaagcgattctcctgtctcagcctcccgagtagctgggattacaggtgcctgccactgcatccggctaattttttgtattttttttagtagagatagggtttcaccatattggtcaggctggtctcaaactcctgacctcaggtgatgcacctgcctcggcctcccaaagggctgggattacaggcgtgagccactgtgcccggccgatgactgcctcagttctaaggtacttacccagccatccacgtagacagacacaaaagcatccggccaaagaagagggagaggaagggctgtctcttaccatgtgactcatctcacggggaaaaaatccttttccagaagcacccagcagatttttcacccagatcctgttaggcctacgaatgggtcatgtgacaagtgctcttattgcaaggaatcttgggaaaaagagactattaggcattttctgcctctttgatgggaggtgggctctgccagtaaggcgggtagtggtggtggctcttggatggacaactgtgtcttccattcttcttcttcttttttttttttttttaagagacaaggtctcactctgttgcccaggcagaaatgcagtggcacaatcacagctcactgctgcctcgacctgccaggctcaggtgatccgcccaccttagcctcacgagcagctggaggagtgtaccaccatggccggctaatttttatattttttgtagagatggggtctctttatgttgcccaggctggtcttgaactcctgagctcaaacaatcctcctgcctcagcctcccaaagtgctgggattacaggcataagccaccacgcctggactctcttctttaaatactgagccttccacctcttctagaatatactctgttaattatcaaccacacttttctacatttttgcttcattattcattcagtaaacatttattgagtgcctactgtatgccaggcacagctttaggtgctggagatgctatgaacaaaacagatgaaaatttctaaaaaataaaataaaaaataaaaataaattttgcaaagccaggcacagtggcttaggcctatagttccacctactcaggagtccaaggcagtaggatctcatgagactgggagtttgagtccagcctgggcagcatactaggactctgtctctaaaaaagaaaagaaggccgggcgcagtggctcacgcctgtaatcccagcactttgggaggccgaggcaggtgaatcgcaaggtcaggagtttgagatcagcctgaccaacatggtgaaaccccgtctctactaaaaatgtaaaaattagccaggcatggtggcaagtgcctgtaatcccagctacttgggaggctgaggcaggagaatcgcttgaacctgggaagcggaggatgcaataagccgagatcgtgccactgcactccagcctgggcaacagaatgagaccctgtctcaaaaaaaaaaaaaaaaagaaagaaagaatagaaaatatctgccctacggggatggacatgctagaacatcaaagtccaatggaactttctgcactgatgaagtatgtatgtatgcaccagccacatgtggcttgggagcacttaaaacgtgactggtacaagcgaatttttcatttaatttaaatgaatttaaatctgtatttaaatagccatgtgtggctagtggttactttattgggcggtgcagctctctaaaggccaagagatacatcatcaacttctctcccttgacccatattcagttctctcccaccctgaaaatctcctctcctacccaggctcacatttccagttcttctcctcttgttctccctcaaccatcagcccccgcaagactgacgtgaccctgatgccgtatgaaatgcattcttcatcctttactcttactcacctctgtgcggccctggagaccagtgacctctcctttctcaaaatactttatttctgtgtgtttttgttgttgctattgtttttggggggttttcttgagatggagtttcactctcatcacctaggctggagtgcagtggtgcgatctcagcttactgcaacctctgcctcccaggttcaagcgattctcctgcctcagcctcccaagtagctgggattacaggctcccgccaccacggctggctaattttcttgtatttttggtagagacggagttttgccatgttggccaggctgatctcgaactcctaacctcaggggatccacctgcctcggcctttcaaagtgctgagattacaggcatgagccaccgcacccagcctcaaaatgcttttgaacttgactgtcaggtatgccattctccacaccagtctcctcccatgtctgtgtcttctccctctccactggggacccttggctttttccacttcactcatctaccctgggttatctggtcttccataaccctgtcctctgccacacctcacttattcacccaccacaatatttattgagtactcactaggccatgaaagatgctatacaaaaaaagcccctgtcctcgtggagctgacattctagaagaaagcatgaataataaatacgacttaataaacagtacggccaggcatggtggctcacgcctatcatccaaacactaagagaccaagatgagaggatcacttgaatccaggagtttgagaccaccttgggaaacgtactgggaccctgtctctacaaaaaaaatattaaaaattagctggatagggtaatgcatgcctgtagttccagctacttgggaggacaaggtggaaggattgcttgagcctgagaggtcaagtccgcagtgagctgtgactgtgcactgcacgccagcctgggtgacagagtgagatcctgtcttaaaaataaataaataaacaaacaaacaaacaatataattccagagagtgaagaggcaggatctctttagctaggaagttgagggatgttctctctgagaaggcagaatctgagtttcaacctgaagaattcgaagaggccagctaggcaaaagatgagagttgaaggaatggggacggcagaggagacagccaatatagtaattctcaataaagcagaaagtgagcttttcctgctggcagaacagaaaggaagtcggagtggccagggtgttgtgggacaaggtggtcagcaggagtcacatcacgcaaggtcatgtggtcatggtagactttaaattttactccaagcctgatggaagccattggaagattttaactaaggagtgacggaaaactggcatctcaaactcaacatgtctacaacccagttcttgatctttgaaaccttcttcctccatcttccccatctccattgacagcaacttcatccttcagttagctcaggccaaaaccctggagtcacccttgatacctctctcctgctccacactcagtctttccattggaagccctaggggctgccatattgttctccatagcacttcacaccgtctgacatactatatcttttcccactattgctttgtccttggtagcatctttaggcactctctgaatatctggcacatagtacgtgctcactaaatccttgttgaataaatgaatgaacatcactccgtggtcctttcagaaccagagccattcttctctttcttcaccaccgttgcccctcaccccgcccaactagtcacaggagttgaaggatgacacagtagagaactgggattctggagtcctgtggctggtctggggttcgagttcttactcagtggtaggaacctccatgtgggattaacttatctggtctttagtttcctcctctgtaaaatgggcctcaaactgccaaccgctgggatgcagggaggatttgatgagcccaggcaggctccctggagcacagcaatcaatggcagctatatataaaccggggcctcttttgtactcccactgcctttgtcctagttccagccctcattacaccagcctgctcttgcggctccctcctaacttctgctccatcaccaccaatctgtcctttcagctgtcaggcttgtcttctgaacgccaaccctaatcacatcccttcctgctccaaaaccttacatgactctcactgtccacaggacaagacccagcctctagttgacagcctccactgtccagcttacccaacctctcccctaccacataccctgagtggagccttctgcctccatagggctttcttagccagagaagcctcccttatcttcctgttctcctcctaattccttcttatccttccagggaggaggctgtgaggtaatgcatcttgggagccagctgggattgcacagggtggtgagattatctgcatttccgaggcttgaacaagttaaggcaatgggaaaggtcacacaatgagaaaatgcagggccaggatttaacccgtctgagatgttctgactgtgctatgctgcctccccggacatgagctctgcgataatgctgtccccaggctgtaatcattccctctttcatccctgcctcctctatccctggggtcagagggacttgtagttgaatctctcactcactcattggtgtggtctctccctaaagcagggtggagtttgtcttagcgttatcactgcatccagcacaacctccctggtccaggcttatcagcgttcaactgcgtcaatgcagttgcctcctcctcaatctcccagcttccggccttgccccctagagagatcatattttaatacaagtcagattacatccctcctcccctcagaaccctccatggctcacaccttactcagagaaaaagccaaagtcctctccacaacccacaaagccctgcaccatccatcacctcactgccttcgtcccctcacaccctcccccttgctcgctctgcttcagccacaccaactcatctctgtttctcaaatacaccaggcatggcctagctattaaatgcacggtccagcctggtgcatttgaagaacacggatgaattggtgtggctggaacagagtgagtgagggggagagcgggaggaggacctttgcaccagctggacctttgcaccggctgttccatttgcctagagttttccctgacatattcatatggctcactctcttgcttcccttgctttctcccagtctttattcaaatgtctatttctctgcacttgtgctgtttgatacagtcaccgctggccacatgtggcctttgagcacttcagttgaaacacatgaaagtgtagaatattgaccagattccaaggaaaaccatgtgcaaaatatcttttatctcttaagatacagggtctcgctctgtcttccagcctggaatgcagtggcacgatcacagctcactgcagcctcaaaatcccaaactcaagtggtcctcccaccaacagcctcccgagtagctgggattacaggcacacaccacaatgccccgcccatttttttaattgttattattttttttaatagcgacaaggtcttgccatgttgctcaggctggtctggaactcctggcctcaagcgatcctcctgcctcagcctcccgagtagctgagattacaggcaggagcttttgtgcccagcaggtctacgatcttcttagaatgcttcaggctgggcatagtggctcatgcctcaaataccagcactttgggaggccaaagcaggcagattgcttgagctcaggagttcgagaccagcctgggcaatatggtaaaaccctgtctctccaaaaaaaatacaaaaattagctgggcttggtggctcccacctgtagtcccagctacttaggaggctgaggaaggaagatcacctgagcccaggaggcggaggttgcagtgagccaagattgagccactgcactccagcctagacaacagggagaccctgtctcaaaataaataaataaataaataaataaataaataaataaataaacaaacaaacaaacaaaccaataaatgaattttacctgtttctttttacttttttaatgtggctactagcaaattttaattttttttttttttttttttttttttgagacagagtcacgctctgtcacccaggctggagtgcagtggtgtgatcttggctcactgcaacctccacctcatgggttcaagcagttcgcctgcctctgcctctgagtagctgggattacagatgcccaccgccacgcccagctaattttttgcatttttagtagagatggagtttcgccatgttggccaggctggtctcgaactcctggcctcaagtgatctgcctgcgtcggcctcccaaagtgctgggattacaggcatgagccaccgcgcctggctataaaatttcataagtagctcttaatagatttctcctgggcagtgctggtctaaacactttttttttttttttttttttttgagacggcatcttgctctgtcaccaggctggagtgcagtggcgcgatctctgctcactgcatcctctgtcacccgggttcaagctattctcctgccttagcctcccaagtagctgggactacagacacccgccaccacgcccagctaatttttgtatttttagtagagacgggttttcaccatattggccaggctggtctcgaactcctgaccttgtgatccgccagccttggcctcccaaagtgctgggattacaggcatgagccaccgcacctggctataaaatttcataagtagctcttaatagatttctcctgggcagtgctggtctaaacactttttttttttttttttttttttgagacggcatcttgctctgtcaccaggctggagtgcagtggcgcgatctctgctcactgcatcctctgtcacccgggttcaagctattctcctgccttagcctcccaagtagctgggactacagacacccgccaccacgcccagctaatttttgtatttttagtagagacgggttttcaccatattggccaggctggtctcgaactcctgaccttgtgatccgccagccttggcctcccaaagtgttgggattacaggtgtgagccaccgcgcccggccctgtaacacttttaacactgaactgtttgccttccaggtggtaaagagcaggtgcctttactgatagaaatgtcaccactcccttcatcccgccagccccatgtcactgacgcgtcctttccccttgctctgtggtaactttctcctaagcactcatcgccctaacatctgtcatacaggtatacctcagagacactgctggtttggttccaggtcgccataacaaagcgaatattgcaataaagggagtcgtgccttttttggtttcccagtgcacataaaagttatgcttacactatagtctgttaagtgcatgatagcattatgtctaaaaaaaaatgtacataccttaattttaaaatccatcaaggctgagcacagtggcttgtaatcccaacactttgggaggccaaggcaggaggattgcttgagcccagggatttgaaaccaggcaacaaagtgagaccccgtttctacaaaaaaattctttttaaaaatagctgggtatggtgacgcatgcctgtggtcccagctacatgagaggctgaggtgggaggctcacttgagcctgagagattgagactgcagtgagctgtgatcacaccactgcactctagcctgggggacagagtgagaccgtatctctcaacaaaaattaaaaaaaaaaaaaaaaaaggctgggcacagtggctcatgcctgtaatcccaacagtttgtgaggccaaggtgggtggatcacttgaggtcaggagttcaaaaccagcccagccaacatggtgaaaccccgtctctatgaaaaatacaaaaaaatagccgggtgtggtggtgcacacctataagcccagctactcgggaggctgaggcacgagaattgcttgaacctgggaggcgggggggagattgcagtgagccgagattgcactgctgcactccagcctgggtgacagactgagactctgtctcaaaaaataaataaataaataaataaataaataaatgttttattactaaaaaagttaacaatcatctgagccttcagtgagtcctcatcttgctggtgaagggtcactggctcagtgttgatgggtgctgactgatcgtgggggtggttgctgaagattggggtgcctgtgacattttcttaaaataagacaagaaagttttccgcatccatcgactcttcctttcacgaaagatttctctagcatgagatgcttgttgacagcaattttacccacagtagaacttttttcaaaattggagtcagttctttcaaaccctgccactgctttgtcaactaagtttatgtcatattctaaatctcatgttgtcattttaacagtgttcacagaattttcaccaggagtagaatccatctcaagaaatcactttctttgctcttccataacaagtaacgcctcatgcattgaagtttgatcatgaggctgcagcaattcagtcacatcttcaggctccacttctaactctagttctcttgctagttccatcacttctgcagtgtcttcctccagtgaagtcttgaactcctcaaagtcatccatgaggatcggaattgacttcctcaaaattcctattaatgttgatattttgacctgttcccacgaatcacaaatgttctttttgttgtttgtttgttgtggattgtttttttatttttaattgagttgaggtctcactatgttgcccagactggtcttgaactcttggcctcaagtgatcctcctgccttgatctccctaagtgctgggattacaggcatgagccactggaacagccacaaatgttcctaatggtatctagaatggtgaatgcttttcagaaagttttcaatttcctttgcccagatgcatcaaaggaatttatctatggcagctatagccttatgaaatgtatcccttaaatcataagacttgaaatagagaattacttcttgatccatgggctacagaatgaatgttgtggctgggcatggtggctcacacctgtaatcccagcactttgggaggctgaggcaggtgggtaacttgaggtcaggagttcaagaccagcctggtcaatatggtgaaaccccatcactactaaaaatacaaaaattagctgggcatggtggcgtatgactgtaatcccagccacttgggaggctgaggcaggagaattgcttgaaccctcttgaagacagaggttgcagtgagccaagatcacaccactgcagcgacagagtgagactctgtctcaaaaaaaaaaaaaaatgttgtgttagaagtcataaaaacaacattcatcttcttgtacatgcccattagaggtcctggataaccagtgcattgtcagcagtaatattttgaaagaaatcttttttctggctgggtacagtggctcgcacctgtaatcccaccactttgggaggccgaggcgtgtggatcacctgaggtcgggagttcaagaccagcctggccaacatggtgaaaccccaactctactaaaaatacaaaaaaattagccaggcatggtagcaggtgcctgtaatcccagctaccctggaggctgaggcaggagaatcgcttgaacctgggagtcagaggttgcagtgagctgaggtcgtgccattgcactccagcctgggcaacaagagtgcgacttcatctaaaatacatatatatatataacatgttatatgtaatataaattatatatataacatatatgtaatataaattatatatcacatataacatatatcatgtgttatatatatcacatataacatatgtgttatatatcacatataacatgtgttatatatcacacataacatatattatgtgtatatatgtcacatatattatgtgttatatatgtcacatataacatattgtgttatatatatcatatataacatatattatgtgtagtgtatcatatgtaacatatattatgtgtagtgtatcatatataacatatattatgtgtagtgtatcatatataacatatgtgtagtgtgttatatataacatatattatgtgttatatatctcatatgttatatataacatatattatgtgttatatattatatatatatttttttctgagtagatctcaacagtgggcttaaaatatcagttatccatgctataaacagacgggctgtcattcagtcttcattgttccatttatagagcacaggcagagtagattcagcataattcttaagaccttaggactttaggaatggtaagtgagcattggtttcaacttaaagtcaccaggagcactagctcctaacaagagagtcagcctgtcctttgaagctttgaagccaggcattgacttctcctctctagctatgaaagtcctagatggcaacttcttccaatagggcatttcatctacattaaaaatctattattcagtgttgccagcttcattaataatctcagctagatcttctggataacttactgcagcttctccatcagcacttatcacttcaccttgcacttttatattatggggacaccttctttccttaaacctcatgaaccaagatcttctagcttcagatttttcttctgcacttccccacctctctcagtcttgctgtgggcttgctgtggattaggctttggcttaagggaatgttgtggctggtttgatcttctatccagaccactaaaactttctccatgtcagcaagaagcctgtcttactttcttatcattcatgtgtttactagagtagcccttttaatttccttcagtaatttttcctttgcattcacaacttggctaacctctagcttatggccttttgtttgtttgtttgttttgtttttgagacagggtctcactccgttgcccaggctggagtgcagtggtgcaatcaccgctcactgcagccttgacttcctgggaccaagtgatcctcccacctcagcctcctaagtagctgagaccacaggtgtgcaccaccacacccagctaatttttttattttctgtagagatagggtctccctattttgcccaagctagtctcaaactcctaggctcaagccatcctctcacctcagcctcccaaaatgctcggattacaggcatgagccaccatccctggccctatctcagcttttgacacgccttcctcactgtgtttaatcatttctagcttttaatttaaagtgagagacgtgcaactcttcttttcacttgagcacttaaaggccattgtacagttatacactgacctaatttcaatattgttatgtctcggggaataggaaggcccaaggaaagcgggagagatggggaaatggccagttggtagagcagtcagaacacacacaatatttatcgatcaagtttgccatcttctatggatgtggttcgtggcacccccaaacaatgactatagtcacatcaaagatcactgatcacagaccaccataacagatgtaataattatgtaaaagtttgaaataccgtaagaattaccagagtgtgacacagagacgcaaagtgagcacacgctgttggaaaaaaaatggccctgatagacctccttgacacagggttgccacaaatcttcaatttgtaagaaacacaatatctacaaattgcaataaagcaaagcacaatgaaatgaagtcttcctcggccggtgtggtggctcacgtccataatcccagcactttgggaggccaaggcaagaggatcccttgagcccaggagttggaggccagcctgggcaacacagggagactccatctctagaacaaaacaaaacaaagcctgcttatatttattgggtttactctcagtctcccccacacagagatagggcctggcttgttattagtgctcagttgatgtttgtgaagtgaaatactaaggacttaaccactgcctgttctttgctgttcatgccctgacagcttttatgtgccagcacagaagaaaacaaggtgcaagaagagaatagtgatctctaagtcagaatttgaggaacccaaattagtaccagaaagctgggaggagaagagaaaaataaagtaaatcaaattaaaagttgaatgggccaagtgcagtagctcatacctataatcccagcactttgggaggctgaggtgagaggatcacttgaggccaggagttctagaccagcctgggcaatatagcaagaccccatctctacaaaaaaaattttttaattttctgaatatgttgttgtacacctgtagtcccagctgcttaggaggcagaggtgggaggatcgcttgagcccaggaggttgaggctgcagtgagctgttgttgcaccactatactcaagcctgggtgacagaataagtccctgtctccaaaaataaaaataaataaattcattttttgtaaagttgtatgtcatggcccctgcctactctggcttcatgacttgctgcttgaacctcaccatccaaatcccagtggtgacaccatgtcatttcttgaatttgccaagccctctttcagtcccaagctctctgtcatggccactctcagcctggaaagttctttccccactggccagatttctccccctcatctatgggaacttgacttgaagtagggggtatcccaggccctggactagttaacacgacctgctgtgtgcccctcaaagccattgtcttcctagctgagaaggcatcacacctgcaacagattcactcattgtgtgcatgtttttcttaaccacttctcttctgcatcagctccatggggcagggatagtctcatatgtcactctacccagcacataggatacgctcagacgcccacttgtggatggtggaaaaggtcagcccaacctaatatgcccatctctcctctaggggtaatcttgagaaaaaaagttgggaacttgctttgtgttagtttaggatgacccagaatagatcctgaaacaagaatttagggcaatccttgtgcaagtagttcatctgagaggtgaccccagaagggttggagaaggagaggggaggtggggcaaggaagggtgagttgtcctgtaggcaactgagctccgtcctactgggagcccacgtggaactcacctcttaagtgatccagaatgaagggtgagggagctgcggtattgatccaccaactcccagcaatctttggttgagggctgctcccttaaagttcattccctgggcctgccccagatttggagacagccctaaggcaagaggtacagataccagttggccacagactgaagtgttaagacccaagcccctggataaaactgaaaaatcaagccagatgtggtggttcccacctgtaatcccagctactcagtaggctaaggcaggaggattgcttgagcccaggagttcaatgctgtagcgagctatgattgcaccactgcattccagcctgggcatcagagcaagaccccatgtctaaaataaaaataaactgaaaaatccccaagttatttgctgtgaccaaccttccattaaccacagaccctctggtattcagcatttcttgtccattatatgaagttctgatgacagtctcttttattgtattgtgccttgaccacgcactgtacatcacttagctctgaaatggacatgttcaggaaacagggccaggtgggaccctgtgtttcaacagcaatacttttacaaatgaggtctcatgacagggtcttgctcggagggtttctatggaagcctcatcccacctactgctatcatccttactaacttgcatttacaaaagggactctttttgaccagaggcttggggtctgtagctgccttctagccagctgatgctggctggtccacacaagcaggatcacacccatttttttgttttcttatttatttctgaataggttagcataccggtaacctgtgtgcctggcattgtgctgaccactttttgtcaacttactgaatcctcacaacccttggaggtattgatactattgttatccaggttatacaaaagggggaaactgaggcacagagcagggatgtcccttgcccaaggttacccaactggaaagtggcagatctgggatctgaacccatgcaggctgggctcttaacactgaactactttcctgccatttgttaaagagccacaaaccaggccaggcaccatggctcacgcctgtaatcccagcactttgggaggccgaggcgggtggatcacctgaggtcaggagttcaagaccagcctggccaacatggtgaaaccctgtctctacaaaaatacaaaaaaaagtacccgggcatgatggcgggtgcgtagtaatcccagctactcgggaggctgaggcaggagaatcccttgaacccgggaggcagaggttgcagtgagctgagatcacaccattggagatcgcactccagcctgggcaacagagtgagactctgtctcaaaaaaataaaataaaataaaataaagagccacaaaccccgaaaggtctgccattcccccagggccccaggccaccccacaatctattgtcattgtaggttgtgaaatatactgaatgtcaccccaaccttgagccatggggaagattccatttctctcattgcaacatttgtgcaacatgaaccatctgttgggggtcttcgtaaatcaccttttatcccgtgaggcaggtactgttaagaccattttacaggtgacaaaactgaggccagtggtgtcgagtcacctgcctgtggtcacccaaccaatacaggacagcttggaatcccaagcacccccgccctgctgtctgacccccaaaacccaccctctgttctccattctggcttctttctttcagcatcttggcgacagttgggacggagtttgacctacggacgctgagggcagttcgagtgctgcggccgctcaagctggtgtctggaatcccaagtgcgtgagtttccgaccctgacaaggggtttgctcacgggccccaggagccctcagtttcccctatgcagagcatctcaggaggccacatcctgccaccagcctgtgtgagggcagtctcttctttgggactccctatagggaaccccctaggaatatgactgtagctccccatgagctcctgaaagcaaactaggagccacacccatttattgagcacctactgtctatcgggagccatgctaagcaccacgtgtgatctcattcagtactcacagccctatgaagttgataggactgatgtctctattttatggagggggaaactgaggctcagagtggctgaaacattggagcagggttttgtggctgagaagtggcagaactaggagtgagcaagtgtgactccaagcctgggccgtaccactggtggcaatgaccattcccatttaatgagtgcctgctgcgtgcagggcactacagaaggactttacatgaattaccttatttcatcctcacagtcacccagcgaacacccattttacagatgagacggttgaggcttaaggaggttaaattactcacctgaattcttagagtggacagtaatgagctctaaaattcatactcattccttgctgctttctcattctccacagatacatctagtccccgtttaagggtggctgccatatgcagggtcaagattaagtgtaggttgagccaaaaaaaaatgtaaaaagcaaaaataaaacagggctgtcctttttctatcttcttgtcttggttaataataataatttagccaggcatggtggctcatgcctgtaattccagcactttgggaggatcacttgaggccacaagttcgagaccagcctgggcaacattgtgaggaacaccacccccacccccccgccaatatctacaaattttttttttttttttagaaattagccaggttgactgggcacagtggctcacacctggaatcccagcactttgggagaccgaagcgggcagatagagcgagctcaggagttttaagaccagcctgggcaacatggcgaaaccctgtctcaaaaaaaaaaaaaaattagcaggcatgatggtgcacacctgtagtcccagctacttaaaaggctgaggcaggaggatctgagcccaggaggtcaaggctgcagtgagctgtgatagcaccactgcactccagcctggacaacagagtgagaccttgtctcaaaaaaacagacaacaaaaagtttaaaaacaaacaatttataggctgggtgcagtggctcatgcctataatcctagcactttgggaggccaaggtggatgggtggatcacctgaggtcaggagttcgagacctgcctggccaaaatggggaaaccccgtctctactaaaaatacaaaacttagccgggcgtggtggcgggcatctataatcccagctactcgggaggctgaggcaggagaatcacttgaacccggggggcggaggttgcagtgagctgaaatcacgccactgcactccagcctggatgaaagagtgaaactccgtctcaaaaaaagaaaaaaaaaaattaaaaagcacttactatgtgccagacattattctaagtatttccatttttttaaagtcctttatcctcccaacaagcctgtgaagtagtctcttttattatcaccattttacattttattggcttcgttcttccggttcattgctacccaggtttaaagagtaagatttcccagaggatcaccagcaggatctttttgtagaaagaagacacttctatccaaggtctctgcaagatcccagcagatgcctgcatcatattaaattaagggccatcccaaatctaatagtcaaaagagccaggtgcagtggctcacacctgtaatcccagcactttgggaggccaaggcaggacgattgcctgaggctaggagttcaacaccagcctgggcaacaaagtgtgaccctgtctcaaaaaatatatgtatattataatagcagtagtaacaagagtctctgtttaatgaccacctatgacttaccaggtacttcactgtgtgtgaactctctcatctaatcgtatgagggaggtactattgcagtccccatttacagatggagaagctgaggtttggaattcactagtaagtggatgactaggtcaggttcccttgaagcggatacttaggtgggtgttcagatgcacctgctttattgggggacggctcttgggagagacagcaggagatcagcagggtggggctggggaatggatagagcagggacgcaatttcagctggagtgtgtgtgacaccagagttgtcctccaatgcatggcaaggatgccggccttttgtacttctatagtcagtcactgtggatgggaggtagagacgcagtagctcccaggtgagatagcttttgatcaccaagggcaattctactaagaagagaggcagctgggaggcattagcaaccaacatccatagcagctggagggcgggtacaccagaaagaaaatgggatcttggccagacaccaagagtatccagcaccttaaccactgcaccacactgcatctgttagcacccacattacattttttttttttttttttttttttgagacggagtctcgctctgtcgcccaggctggagtgcagtggcgagatctcggctcactgcaagctccgcctcccgggttcacgccattctcctgcctcagcctcccgagtagctgggactacaggcgcccgctaccacgcccggctaattttttgtatttttagtagagacggggtttcaccgtgttagccaggatggtctcgatctcctgacctcgtgatccgcccgcctcggcctcccaaagtgctgggattacaggcgtgagccaccgcgcccggccagcacccacattacatttttaagcccttggagtggcatggcccctcgagctatcctgacagcttccctctcttactgtggtctccacccatcaagagccatgggaagttcctgcaatcaagaagcaaagcctcaggctatatgtttgaaccttcattttgatcatagactttcctagtagataccatagtggttacaaacataggatgttgtcatcgttcagacctgagttaatagcctcaagaaaaaaatggtagtggaaccaggtatggtgaagtgtgcctgtagtcccacctactcgggaggctgaggcaggaggctcgcttgtgcccaggaggtcaaggctgcagtgagccgtgatcatgccactgtattccagcctgggtgacagagcaagcccatctcaaaaaaaaaaaaaagccaatgataggcagagaaatactaactaaggctcttgctctgtcgccaggctggagtgcagtggtgcaatcacagctcagtacagcctcaacctccccagactcaagcaatcctaccatctcagcctcccaaatagctgggactccaggcacacagcaccatgcccagttaatttttttgtattttgtagagacagggtttcaccacgctgctcaggctggtctcaaactcctgagttcaagtgatccacccgcctcagcctcccaaagtgctgggattacaggtgtgagccaccacgcttggccagctattattattattaacattcttcgagtcttacaacagtggaacttttagtgcaggatgcgaatttcagtattaaccccttcctctcccaaaaggatttgaagcccagagtaattcagccgccatgaatgaaccatttgttagatgagaggctactggaggctgagcttggtaggataagagcttgcatggggtccctgattgatgacaatacccccagatttaggtcttcagatgcccagttgggtgtgtcttctgttccactgtgtcccttcggggactgttccctgccttctttctttttgagatggaatctcgcactttcacccaggctggagtgcaatggcgtgatctcagctcactgcaagctccacctcccgggttcacaccattctcctgcctcagcctcccgagtagccaggactacaggtgcccgccaccacgcccagctaatttttttgtatttttagtagagacggggtttcaccatattagccaggatggtctcgatctcctgacctcgtgatctgcccgcctcggcctcccaaagtgctgggattacaggcgtgagccaccacacctggccccctgccttcttattcaccaccatctttctgaattgggttgctcagaacagagaaagcaacatcagcacatgggcaaacatggggcttcatttcagatggacctgggttcaaatcctagttctgcctttttttttttttttttttttttttgagacagagtcttgctctgtcacccagactggagtacagtggcgtcatcttggctcactgcaacctctgcctcccaagttcaagcaattctccttcctcagcctcccaagtagctgggattacaggcgctggccaccatgcccagataattttttgtatttttagtagagatggggtttcaccatgttggccagacttgtcttgaactcctgacctcgttaatccgctggcctcggcttcccaaagtgctgggattagaggcgtgaaccgccgccgcgccctgcctagttctgccatttctcatgcattctctgggtgaatcacagcatctctgttagccttgcttcccacttctgtaaaatgagagtgactttacatgtatggccacctcaggggcttgtcactagaagccagtgaaataatgttgagtctggttccttggggttgaaattgggaccgccaaccgctttcctacccagagcagcaactagcctatatggcggccttttatgaatgaggaaaagacaccgcctcttggcagaaaaaaaaaattaagaaaatggctccctcttctgggtgcaagttgcccaacacccaggaatatggctccaaaagcaatggactcccacccctttcttgcccaaaagatcatcaaatggaacagcatgtcaaatacctttattaagtactttaaagttggctgggctctgtggctcatgcctgtaatcccagaactttgggaggcagaggctggaagatcgcttgaggtcaggagttcgagaccagcctggataacatagtgagaccctgtctctataaaatatatatatagatttatttgagacagcgtcttgctctgccactcaggctggggcgcagtggcacaatcatagctcactgcagccttaacgatcctcctgcctcagtccctagagtagctaggactacaggcatgcaccatcatgcctggctaattaaaataaataaataaataaatactttaaagttaaaagtgctttttaaaaaataataaggccaggcgtggagactcacgtctgtaatcccagaactttggaagaccgaggcgggtggatcacgaggtcaggagatcgagaccatcctggctaacacggtgaaaccctgtctccactaaaaatatgaaaaattagctgggcctactcgggaggctgaggcaggagaatggcgtaaacctgggaggcggagcttgcagtgagccgagatggcaccactgcactccagcctgggcgatataacaagactctgtctcaaaaaaaataaataaaataaataataataataataggggccaggtatggtggctcacacctataatcctagcactttaggaggctgaggagtttgagtccttggagaccaggggtttcaggccagcctgggcaacatagcaagaccccatctctacaaacaagttttaaaacttagccaggcatggtggtgcatgcctgtagtcctagctattgcagggactgaggcaggaggatcacctgagcccaggaggttgaggctgcagtgagctgtgattgtgccactgcactccagcctgggcagcagtgcaaaaccctgtctcaaaggaaaaaaaaaacctaggaagtgttgttcccatgataaggatcagcctccgtgtggtgcttccttcaccattgcccaatccccaggctcctgggtgcttaatgttccctcaggaacacacctgctttgtctgggagagacctgggcgtcttggtggcggggtttgggggtacttgctcatgggcttatggggcctctctctgtgtccccccaggtttacaagtcgtcctgaagtcgatcatgaaggcgatgatccctttgctgcagatcggcctcctcctattttttgcaatccttatttttgcaatcatagggttagaattttatatgggaaaatttcataccacctgctttgaagaggggacaggtaggtccacggagcatgatgcatctttccagttttctccttcagggacaagctcttgggaggattaggcaggggtgtgcttctttctcctggcagctgggaggaccgtctccttcagagagcactacaggagaggcagtgagtgaaatagcctctgagatcttagctgttgaaaggggtggggttccacagaaggtgacccagcagagaaagagtttatttgggaatgatcccaggaagcaccatcgggggaatgaggaagtgagcagagaaagaagggatcttttaaagagtgtgctatcaagcgggttaccacttaaaactgggactggatccccctgggcacctctgggagacagcaaagaacacacaactcagctggtcacggtggctcacgcctgtaatcccagcactttggggggccaaggcgggtggatcacctgagatcaggagtcagagaccatcctggccaacatggtgaaaccccatctgtactaaaaaatacaaaaattagctgggtgtggtggcaggcacctgtagtcccaattactcaggaggctgaggcaggagaatcacttgaacccgggaggcagaagttgcagtgagccaagatcacaccactgcactccagcctggcgaaagagtgagactccatctcaaataaataaataaataaaaatataaataaaaaaagaacacacacctcagagccgtcccagccaaggggcaagggagctggggtatttatacactggcttctttttgacattggtgaggactgctcctagagtgggaattaatgcctggcacatctggctgagtggaacaggtattctgggtgctttcagacctcgaccagtcctgacttctaaagcaagcaagaagtggggagagttgggccagaaaagggttattgcctcaatgcattgtgagtggtaccttgtggaaggtgagagacagagaagattccaggcacaggtgccatgctaaacgatagttctcatttattataggaacccatggatttattttgttctctgccctgagtgctgggtgagagtactggatgagtcctcctggtctcccccaacccccaggatgtaccagagataccccaattgggagtcctggcaccaaccaatcagaacctagcactcagcagcattctgcccctccctgactatgcccacattaacccttcagtggctgggtctgggggtagggtgagccccggaaaagccaggcagcgcagagacactctcccagggctcagctctgaaccagcagtgtggaagcagtgtgtccaccacgatccacactcaggaaccaaatagcccttggatacgttttcagttaaatctttgccatccaaactctagctgcttgctctctaaagctccagaatgaaatggaatcaagtaggaagggatgccttcagtatttcagtatttggaccactggccatctgggtgcagacagactgaatagcagttctggttctgatgatttgggtcaagggagctgtgaattgaaggagtggatagaaggaatcaagaagcccaaaggggaacccaggtgggcagagaaagaggtttcaggccccttatttgggaaaggcagccacagaagaagattctgtctgggagtggatttccacccaccctctccacccagtgacccccaagtggatccgcagaggcagcccctgagccctccctccccactcctccccacggggagggaaaacccactggggaaggtttatttgcaatggttggaggtttgggtttttttgtgggttttggtttgttggttttttttttcctctttttctcttgctcctcctgtctctttctctcctgggcttgtgaagtttgctcaatatggaatgtcctaattatttctttccccgatgaagaaggtgttaattgaggcagagctatttctgctcctggcctcgtcacccaggcggaaatgcgagagagagagagagagagagagagaatgaatatggggcagggcctcttggaaaaatcagccgtgagcagagaaaccaggactcctggatcctaggtttctgtgaagttttattttatgtttttctaccctagactagctaaaggagaagaggccatggggttggcttgggtccgagtggggttttgaggggacagatgtgggtggtgccaccagaggggaggaagcctcgatttaggagaaagactgaaaagctagctcacgattaaaaatataagacgtgtgagtaagagacagatatatacagacacccaggcagtgggttaattttaaaatgtatttataaccgaattcctcagacactctggacgcttgtttttctagaagcaacgctcagagtgtttcgtgtcggtggttggggggttgagggggattgcaaagctgctaaagatagacccgttttcagtagcattcctcagtgtcgggagcccagttcctgtgtgcccagcaccgtgccaatcgcttagaaggaagcaaagataaagtggaaggcttcctgctttctaagagcttccaaaatagttagaggaaacaagacccctcatttgcagccatttttaacagtgaaggctaatgtgtgattatacccacgcccccctaaatatgaaaattcagtagctattgtatgcctgaaaggggccaggtgcagtggctcacacctgtaatcccagcactttgagaggctgaggtgggagtatcccttgaggccgttagtttgagaccagcctaggcaacatagccagaccctgtctctgctaaaataaaaatttaaaaattggccgggtgcagtggctcacgcctgtaatcccagcactttgggaggccgaggcaggcggatcaaaaggtcaggagttcaagaccagcctggccaacatagtgaaaccccgtctctactaaaaatacaaaaaaaataaattagccgggcatggtggcgtgtgcctgtagtaccacatacttgagaggctgaggcaggagaatcacttgaacctgggacatagaggttacagtgagccgagatcacgctactgcactccagcttgggcaacagagtgagattttgtctcaaaataaaaaaatttaaaaattagccatgagtggtggtacatgcctatagtcctagctactcaggaggctgaggaagaaggatcacttgagcccaggaattggaggctgcaaggctgcagtaagctatgatggtgcccgcactccagcctgggtgacaaagtgagaccctgtctcaaaaaaaaaaaaaaaaagagagagaggaaggaaagaaggaaggaagggagggagggagggactggggctgtgttaactgggctacacaaagaggctacatggagggtgggaattgagccagacttggacatggcgtggagacagagaagattccaggcacaggtgccatgctaaacgatagttctcatttattataggaacccatggatttattttgttctctgccctgagccttatgtttaaaagatttttgccttccaacctgtatttatcaaataatagttcatgtaccaagtccagcataagtgaggaaggcgtttccaacaacttaagttcatggcgaggctagacttggagtttctattcagccagagcttgaaaggccaacaagattcattcattcagcattggtttatttccctctgctgtgtgctcagtcaagggagcagagaattggtgctgcgaagtctgtagcacatacattgagagatatttttgttgagtaggaagcttgagtttacacacactcagctgtttgttttcttgtccgacaatgccacggtcgtctttgaaaaccttcaaaagcatcgctcacagaataaggtcctctcagacccgctgtgctggtaaaatgaggacactcccagatgtgagctttcctgcctccctaccccatcaataccttaagatttggactgacctttagcgttcagcctgactgccacctccccaggaagctgtctttggtttccagcaaaaggggtgtctgttggcacgtttctctctccttgtggcattttcacagcctgcctcctgctatttggggagaaagctcagctcctgttccttacccttaggcaagggtaggaactgtgtgtactggtgtccctcacccccagaacagctccctgagcccagtacatcccaagaagaaaaaaatcagcaaggcttataggagaataacacaatgcgcttgacaaatttgtcctaatggatgtcggaagaaggctgcacttaccagctacaccatgcacacggcacatttactaaaactgactatattatggaccataaagtttgtctcaacagaggtcaaaaagctgaaaaaaatacaaatacaaaacatattttctgaccgtaatgcaattaagctggaaatcagtaacaaaaagagaactctaaaagtgtttgcagattaacagacatgcctctcatttatggatgaaatgatatgatgtctgagctttgctttaaaaatattctaggctgggtgcagtggctcacgcctgtaatcccagcactttggaggccgaggcgggcggatcacttgaggtcaggagttcgagaccagcctggccaacatggtgaaaccccatctccactaaaaatacaaagattatccaggtgtggtggtggccacctataatcccagctacttgggagcctgaggcaggagaatcccttgaacctgggagtcggagattgtagtgaggtgagatcatgccattgcactccagcctgggtgacagaatgagactccgtctcaaaaaaaaaaaaaaaaaaaaattctagtggcaaggcaaagtgtttggaggggatacagaggaatagatgaaacaaaatttgccagaagtaaataggtaagtgtctaaattggtgataggtacatggtgaatcattatattgttttatacttctctctcgctctctctctccccccgttctctccctgtcttcctctcccctctgtcttcatatatatatatatatatatacacacacacacacacagacacctaataagtttttttaaaaaacaaatacatctaaattacccataggtcaaagaagaaataataatggaaattagaaaatattttacttgaacaataatgataatgcatgacaaaatgttgagatgcaggtaaagccacacttaaaggcaatttatagccttaaaggcagttaatccatccatctcaaaagtttaggaaaagaatagaaaaaaaaaaaaaactcatggaaaacataaagagaaaagtagtaaagctcagagaagaaattaatcaatagaaaaccaataatagacccccaaagccaaacattgatctctttgaagactgatcacgtttgtcccaaaagttattcgttccaacagcattatagagtcactggtccctatttctcagagctggttttccctgctccttcccctgacttttctccccttcccttttgtagatgacattcagggtgagtctccggctccatgtgggacagaagagcccgcccgcacctgccccaatgggaccaaatgtcagccctactgggaagggcccaacaacgggatcactcagttcgacaacatcctgtttgcagtgctgactgttttccagtgcataaccatggaagggtggactgatctcctctacaatgtaagtgatgctgggacagtgtgtgtggacaatcagagtctcagggaggtggcctcctgggaccagtgagactccaaggctgcaatggagggaccctgagctgggaaaggcagcccaaggacaacacagccccactgaagctggcctgaggctcaggcttttgaagattacaggggctcatgagcagaactctaactatagggcatagaagtctggagggcccccagatgcaacatcatttttcattgtgcaagtgtttagatataattttagatttttgaatacggaaaggttatgtgatccaaaaaccaacacagataaaagatagagtaatatctttggacgtaggcgaggggtccctgccctgaggctcacccagtccttctccagccataccactccccgtgggatgagaagttcctggagccaaggggatgtgtctaccaagagcttgtgccccactttgtaggccatgttttaagttaccaggatcctggaattccctgcccatggccagattccatgaacttgcgtgcaattctcatatggatctgttcgtaacccaactgagggccaaggacatccgaggggtggctgttaacacaaatgtggccagagcttggatgtacaagctggaatgcccacacatatgtgtggagcccctctggcaggacagagccatgactaagaagagaaagggacaggacagggctggctctccccacaccttgacccagtgcagatatccggattctaaattccaccctgaccttccaaagtgtaaaggaaggtatatttgcaaagtagaagcacacagcatgttttatttagttaccttttcaatatttccccgtagtatgtggtctgcttttgtactcttgccctagatcttaaaaatgttagggatgtttctggaaagatgtatccctgcccccacttgcatgctacttcctcttcccacaatatgcaacccctttagttcctcagaatatccttccaatgtttatttatgcaattataattataagcataatcgaatctatgtcctcccccctctttcttatcccaaggagtagcattctatacatgctgttcaattctgtgatttttgttttctcataaccacacgttctagagatctttccactgcaggacatggacagtctcttcacgggtgcacactagtatgcccagctaatttttgtagagacagggttcttccgtgttgcccaggcaggtctggaactcctgggctcaagcaatcctcccgcctctgcctcccaaagtgctgggattacaggcgtgagccaccacgcctggccttctttattcttttgcacagctgcatagcattctattgtgtggctgcccatagttttatttgtttgccattaagagaaatgcttgactggcttcctgtccactgacatggaacatgatgctgctctgccaggagcatgttgcacgtacctcttcatacttttgcagatatagctagggggttggagggtctccattcccagaagtgggattgcaggatcaaagactaaatgcatttataattttatttttggggaagatttttgttttgtttttttggagacaaggtctccctctgtcgtccaggctggagcgcagtggtgtaatcatagctcactgcagccttaaactcctgggctcaggtgatcctcccaccccagcctcctgagtagctgggaccacaggcacacaccaccatacctagctaatttttaagaacaattttatagagatggggtctcactatgtttcccaggctgctctcagactcctggcctcaagcaatcctcctgcctcagcctcccaaagtgctaggattacaggtgtgagccactgcacccagcctaaatgcatttataattttgatagatatttaggtgtgcaagttttaaaccccactctgtcctcaccacagttcaccttccctcacctactatgcaggtaagcagtccccaggcaggtcacttgtcagcagctggagtggggcagagccaaggattcaggatcaaacacaaggatgccacaactgtagtgaccccatagagcaccctggggctgctccatacacacagctctgttgaccagtggaggtctcctcttcacctgccctaagggctgaaattaccattgaagtttaggccagcggttggcctgacccgggagcaatacctggcttcctcctcctgtacatagagaagctgaactttcctcttggtcctagtgtatgttccttaacaacccatttatgcctagtgttccattattggaatgctaatcctgtgggagttatttacatcctgctgctcaaggtcatcactaaggtcggatttttcacacacacaaaaattgcaacctccggcataaatgggttaaggaatttccccacttgtgggtggagggagatttgcaaaaactcatccttgtaatcctgatcaacaaaggcccgttttagttgggagtaggcagcaaaaggagccacatgaacagttgcgcctgtcacgcactgcacaagaatgtcattcatatcatagacaacatacgatttctactgttatcctgataatttattgacagaaaaaaggatgtggggaagggacatggtgttctaatttgcatgaaaacctcgtctgagtgtagcatctctgggaacatgcagcagatccgagctcaggccctctcttggccgtcacctgcaaacagcttggacaaagggtcagcccaattggccaaaactcactggggaatttttgtgggttctaggtttttactttgcaaggctggtgtgagaggaggttccagcaggaaatgaaccctcctgagagggaaagagactgggaaatggagaaggctgggaactcagggagagaatgggagtggggaatgggagctgaaaaaaattgtgagcataaaaaagggatatgtcacagggttggatgaccagagaaagcgtctgggggttcagattaagatgctgggggcgtgcccagtggtgggacaggaagcatgaatttccagagggctcggttataaacatcattgtccaatgggtgtttcccttggaagcctctaagcttagagctaagccacctctggggacacaaactgagtggttaagagcagagactcaggtgtcagcctgtctgggttccttccgactcttccacttccttgctgtgcagccttcggcaaggtgcttggcctctctgtgccactatttccacatgtgcaaaacgaagagaagcatagtcccacctcacaaggcacgaggactaagtaaggtggattcgcatgaagtgtttagaactgatcctggcccggggtgacctccgtgtaagtcaaattccccaccctgcatggtgttccttttagaaatgtgcatgaatttttcattagaacagctccagcagtgcctgaggaagtggagtgaggtgtgagaggtcttactttattcccctcgctggccctgctattaaccactaactcagagtagctttctagcactttccacacatttacatcccaccctcgtcctttggttagcagcccatgcaatgatttggccttaatgtgaacctagaacacagcttctcgcccagggatgatttctgcccccaggggacacttggcagtggctgcagacatttttggttgtcacaactggatgggaagaaggaggatgctattggcatcaagtgggtaaaggccacggatgctactcaacattctacaatgcacagcatcccccacctctgccccaccatagagaatgatccaggcccaaatgtcagtaaggtttctgtcaggaaaccctgggtcagaagaccaaggttccttgaggacggggatgccttatactgcaatcagctgtcactctctgcctctctctggggctgctgtgatcacctggcctgcatggacaacccctaggagcagcccccatccagtgcctggagaagtcagtggataaataccccagctccctccctgtcgggcgttttgctctgccctgcatctctccagtgggatcaggctctggttgcccgcagggttaacctggtcacgtacacacccttcacttgccaccttcccttccctgtctggtatttcctgggatgaacttttagatttatttcctggggctgctataatgaagcaccacagactgagtagcttaaaacaacaggaatttatggtctgacagttctggaagccagaagtccaaccccaagatgttagcagagctgacaacacgcccctcaaaagcctccgggggaggatccttctttgcttcttcctggcttttgctggtttcccacaatctttgggattccttggcttctagagccttcattctccattccagtcttctgtcatctaatagcatcctcccagcccgggcacagtggctcacgcctgtaatcccagcactttgggaggccgaggcaggcagatcacttgaggtcaggagtttgagaccagcctggccaacatggtgaaaccccatctctactaaagatacaaaaattagccaggcgtggtgggcgggtgcctgtaatcccagccacttgggaggctgaggcaggagaatcacttgaacccgggagatggaggttgcagtgagccaagatcatgccactgcactccagcctgggtgacagaatgagactccgtctcaaaaaaaaaaaaaaaaaaaaaaagaaaaagaaaagcatcctcccttcgtgtgtctgtgtgtgttctcctcttcttagaaggacatcagttgtattggatcagaacctaccctactccagtccaacctaattttaactaattacgtctgcaattaccctatttccaaataagatcacattctgaggtaccagggggttaggacttaaacatttttgtgtgtgtagcaggaggacgtaattccatttataactcctcctaaataaaacgacttgcatgtgaactcttgtctggggcttcccaaagtgagataacccctctctctacccctaaaacaacgagtagcgtctgtcaatgccagggtgcaggggctaaggtgcccatctttgagtttctgctgaggaggacacagctgctacgttggagcactcttgggttctgccttcgtgcccagccatctcccttgggctagccctgccctgggtctatcctagaatgagcctcgatctgtttggccataggcaagcagagtgtctggaaatctttgtcctccatgactggtgctggagccgaagccagtgggtgtggccttgccagccaactccatttacccagctctgaacaagctagtagttgagatcaacggagagtccagacagtcgctccaagcatcttggaatccatggacacaggtgtaccgcagaggcttcccacctgggtaggcagccctttgtaagatcctggcaccacatttattctcttaacatcctttcagttatccagtaatcatttattgagcacctactgtgtgccaggcaatgattaggtgattggagacactgcaacgaagaagacagactaaaatctccaccctggtaggagagacagatgcaaatggtaaacatgataaataatcaatcacccagaaagcaggagacactaagcaaatgtgtatgtactatgggaagcccaataggaacgaaagctacacaagagaacaagtgatgggtggttccttagtctaggtcaggcaatcagggagggcttctcagaggaggtgatgtttgagcagagaaggagggagccaggcagatgttttggaaacagcattctcagcatggagaacagtggcagctcacctacaggatgtgtttgattcccttccagattttgtattcgtttcttgtttttctcccttggcttcctggtttaaatgccttttgaagaaatctaagctcaactaatcagcgatgctgttgaaggtttatatcaggatatgcatcccagagttatttacaaaattagaacaaaactggaagcaattgaaagcctgacaataggagatcagttaaataccgtatggtccttccgtatgatggcatattatgtcatcattaaaaatcgtctgctgggagaatattaaggatacaggggaaaggctcaccatataatgatgagtgggggtgctgggcgcagtggttcatgcctgtaattccagcaatttgggagtctgagatgggtggatcacttgagcccaagagtttgaggccagcctgggcaacacagtgaaacccaatctctacaaaaaaaaaaaaacaaaaatacaaaaatcagccaggcatagtggcgtacatctgtagtcccagctactcaggaggctgagacaggaggataggatcacttgagccctggagtcagaggtggcaataagccgtgatcacgccactgcactccagcctgggcaacagagtgaaaccctgtcaaaaaacaaaacaaaaaaaatgatgagtgggagaaacaagtttttaaacagggatcaaggaggccaggcatggtggctcacacctataatcccagcactttgggaggccaaggcaggcagatcacctgaggtcaggagtttgagaccagcctggccaacatggcgaaacctcatctctactaaaaatacaaaaattagccaggcatggtggcgggcgcctgtaatcccagctacttgggaggctgaggcaggaaaatcgattgagcccaggaggtggaggttgcagtgagctgtgatcatgccactgcactccagcctgggcaacagagcgaaagctgcacgagagaagaagtgatgcatggttccctagtctaggtcagccaatcagggagggttcctaagaggaggtgatgtttgagcagagaaggaggaagccaggcagatgttttggaaacagcattcccagcatggagaacagtggcagctcaccctgtctagaaaagaagaaatgataagaggggaaaatgagtttttaaaaaggaatcaaggggaggtaaaccttatgatctcaaaggtacaaatatgaaaatataagtaaagaaaaactggaggacactgtaccaagctgaccttcgggtggtgggatttgggaatcttgatattctcaatacttctttgtatcttcaaatttctctatgatgatcacagtttactttttttttttttttttgagatggagtctcactctgttgcccaggctggagtgcagtggtgcgatcttggctcacttggctcacctctggggttcaagcaattctcctacctcttcctcccaagtagctgggactataggcatgcaccagcatggtcagctaattttttgtatttttagtaaaaatggggtttcatcatgttggccaggctggtctcgaactcgtaagttcaagtgatccaccaacctcagcctcccaaattggcttgagccaattaaacttgtcttgctaaatggttagcggggagaaagaagaaggtctcgggtcattcctagaccaggaggcagggagaaagggaggagaatgaacctttcttaggcaaacagtgtcctaggtgtccttatcttacataatctgtcgagagagtcacactaaaataaatcattgattgattgattgatacatcaataataaatggccagccttggtggctcacatctgtaatcccagctacttaggaagctgaggtgggaggattgtttgagacaaggagttcaagaccagcctgggaaacacagcaagactcatcttaaaaaaatttttttttttaattagccagatgcggtggctcacgcctgtaatcccagcactttgggaggccgaggcgggtggatcacgaggtcaggaattcgagaccagcctggccaacagggtgaaaccccgtctctactaaaaatacaaaaattagccaggcgtggtggcacacgcctgtagtcccagctacgcaggaggctgaggcagaagaatcatatgaacctgggaaacagaggttgcagtgagctgagatcacgccattacactccagcctgggcaacaagagcaaaactacatctcaaaaaaaatgttttttaattagccgggtgtggtggtccatgtctgtagttccagctacttgggaggctgaggcaggaggattgcttgagcccagcagttcaaggctgcagtgagctatgatcccgccactgcactccagcctgggcaacagcaagaccccatctcttaaataaacacataagtaaataaatgatcatttttattttattattaaatacacaagataaatgaaaaacaggcaaatctttcttacaaaagaattccatttaaagtatgtaaacttcactccccactgccccaggaggtggagactaatctcccctactttgagagtgggctggatttagtgactcatttccgaagaatagagtaggtaaaggggaaaatagaagttttatagcggaggaacagatagataccactttaaccaaatgatgaagattagtatcccccagggatgtggatattatgtaacccttgattttatgcctatatagcgttcttcccaaaaactcctaatcccagttttttggggttttgctctgtcttctaagctggagtgcgatgatgcaatcatagctcactgcagctcaaactcctggtctcaagcgatcctcccacctcaacctcctgaatagctagggctgtaagcacataccatcatgcccagctaattgtatttttttggtagagacatgttctcacacattgcccacgctgtcctcgagctactggcctctagtgatcctcccaccccagcctccagagtcactgggattataggcatgagccactgtgaccagcccagaatttttttttaaggagttgtgatgtcgtttaagagatgtgattcttcataacacatcaacaacaagtcccagcgatgggttggataagtcttgggatttcatgggagtattaagcttaaaagactttgcatgatatctgtgaactatatgtgatttctgttggtaatgggggtcactgattctgcggtttgccacctccaatcatcatggaagaaaatgttccacttccagtgaaagtaagaggaagtaaaggggtaattattttctatctaaattcacgaactccttgaattctgtccacagacccctaagtgtttcctccccaaggtgaaactgagagaatcttgccagtgccttccgcagtcactgtggctagaaaacccctcagaagaggtgatagtttagcaggtaactggagttctcaccatccgtgtctggctcagcccccatcacaaccagttacccagcccaaaatgtcagtagtactgaggttgagaggctctgctctaggaggccaggcctctcagaggaaggaggattggggtactggctgggcctcaagatgaacctaccccctaagagctttgggatggcgtgagtttctgtccatacccaaggactacaaatgcaggtttactggaaattctgtgccaaaagtgaggtccaactcacttctaactgctacaaaacaaacctccatcaacatagcccatctctgttcttgacctggaagctccaaggtatccacatggctcccatgcccactagacgggcctcttccctggaccttcctgggccagagaaggctctgggtagccttgtggaatcaagatgggtgatcagccacttcctctgtgccaccctgttttggctacttccctaggcatcagcctgggattccttgatggtaaaaatataaaactctctgagctagggcctttaatatccccattttacagatgaagaaactgagtcccagagctgtgcacagcgattgagagtcagaattcagctctgtctcactcagtgtcaacatcctcagattctgccatttatagcctcccacagcaaataggattgagggctgcttctctgagctcaaggggatagaatggggaaccccatgagtactgcaacaaaactgtttgctggagacaagagctggtggctctgtgttgttctagtgacaggtggcctcatttcacagggaccccctcaccctatgtgccccatgtggctcagaaaagccagaaattgtctccactctcacaggggaaggtccctgaccccctctttgccagctgggccaaggcaaattggggtcacttcatggggtacaggacctaccctctcttggttgcccccaaggaggggatgtggaggggctggggacctggcaggaccagggtgtcttgagttaatttggggctgcctttagccgagggcttctgtgtgcctggcatcagctttacattgtgtcttgatccgtaaaacagccctgtgaggaaagatatttttaaccccatcttccagatgaggaaacggaggcccacagggtgacgtgacctgccaaggtcccctagccaagagtgacaaagccagggttcacacacagctctggacacaattcatcacccttcatccgtctctctctgactctttctttttccctctctctctttgtctctctttttttttttttttttttttgagacagcgtctcactctgtcacccaggctagagtgcagtggcgcaatctcggctcactacaacctccatctcctgggttcaagcgattcttgtgcctcaacctcccaagtagctgggattacaggtgcgtgccaccacacccagctaattttggggggttttgttttgttttgagatggagtcttgctctgtcgccaggctggagtacagtggcgtgatctcggctcactgcagcctctgactcccaggttcaagtgattcccctgcctcagcctcctgagtagctgggactacaggcatgcaccaacacgcccagctaattttttgtattttagtaaagacggggtttcaccatgttggccaggatggtctcgatctcctgagctcatgattcgcccgccttggcctcccaaagtgccgggattacaggcgtgagccactgtgcctgccaattttttgtatttttaacagagactgggtttcaacatgttggccgggctggtctcgagctcctgacctcaagtgatctgcctgccttggcctcccaaagtgctggtattacaggcatgagccaccatgcccagcctttgtctcttttattcttgtgttctctctctctcttccttctctttctccacctccttctccttctctcccttctcctcacccttctttgtgcttttctctgtgagtttctcttcttctctatttctctcctttggtgaatgtcaattagaaaagcagaaaaactgcgtttaatttgtgatcataaatgcatgtccctggccaggcgtggtggctcacgcctggaatcccagccctttgagaagctgaggcaggaagattgcttgagaccgggagttcaaaaccagcctggtcaaaaagcaagaccccatctttaaaaaagaaaaataattaattagctgggcatggtggtgtgtacctgtagtcccagctactcgggaggctgaggaaggaggattgcctgagcccaagggtttgaagctgcaccgagctgtgattacacccctgcactccagcctgggtgacagaaccagaccctgtctcaaaaaaaacctaataattaaaaataaataaataaataaatgcgtgtcccctggccagtggttgctaatgtttggaatcacctttgacccatgccctttttcattcatagatgtttgtcttgaccaaaatcaaagcattagactttggactataaatcactggttcattcaacaaccatcattgaatgcctactgtatgcagacactcttctggacacagaggagttgacgtgttggtggggaaagccagtgatcagttgggataaaaagggcagacagcagacattaaatagtttaggctttgtgggccagatggtctccatcgcaacgactcaatctgctcctgtagcgtgaaagtaacgacagataaagcgcgtaagtgaatgagcatggctgtgggccaattaaacgttaacctataaaaacaggtggctggcccgcgggctgtagtttgtggatcactgccttagagatagtgttagagggtggtgagaggtccgggatagaataaaacagtagagagtttgtgcattgtcaagatgagaggttgcagttcttcttatacaccccgaatggccgggcaccgtggccattatgatctataattctaacactttgggaggctgaggcaggaggatcccttgagccctagagtttaagaccagcctaggcacatagtgagaccccatctctacaaaaaaaaaaatttaaaaattagctggacatggtggagcatgcctgtaggcccagctacttgagaggctgagatgggaggactgcttgagcctgggaggttggggctgcagtgagccgatcatgccactgcactccagcccggatgacagagcaagaactgtctcaaaaaaaaaaaacaaaaaaacaaaaaaaacagacctgaaggaacaaatcatatgaatgcattaaagtatcacatgtatccaaaaaatatatacatctatcagcctggcacggtggctcatgcctgtaatcctagcacattgggaggccaaggcaggcagattgcctgagctcaggagtgcaagaccaccctaggctacatggtgaaaccccgtctctactaaaatacaaaaaattagctgggcatggtggcaggcgcctgtagtcccagctacttgggaggctgaggcacaagaattgcttgaacccaggagacagaggttacagttagccgagatcgtgccactgcactccagcctggacaacagagcaagactctgtctcaaaaaaaaaaaaaaaaaaaaaaaaaaaaaaatatatatatatatatatatatatatatatatatatatatatatatatataatcaattaaaaattttccttaataaataaacatttctctccttctctcccttggtgaatgtcaattaataaagcaacaaaactatgtttagttagtgatcattaatgtatgtccctggctgggtgtgatggctcacacttgtaatcccagcactttgggaggctgaggcaggagaggatagtttgaggccagcaattgcttgaggctttttgaaagacatgaaggagatgaagggagccatggagatatctcagggaacagcagccgaggtagatggaacagccagtgcaaaggtcctgaggcaggatgttcctggcatttgtgaggacatgtagctgcccagatgtccagtggggagtgagtgaggatgaaggaaggagctgatgaaggaagatgataaaatacttcatggatcagccaggcatggtggctcccgcctgtaatcccagcactttgggaggccaaggcgggtggatcacaaggtcaagagttccagaccagcctggccaacatggcgaaaccccgtctctactaaaaaatacaaaaaagttagccaggcgtggtcatgcacgcgtgtactctcagctacttgggagactgagactcgagaatcgcttgaacccaggagatggaggttgcagtgagttgagatcaccccactgcactccagcctaggtgacagagcgagactctgtctcaaaaaaaaaaaaaaaaaaaaaaagacttcgtgaacagacagcctatataatttatgatccaaaccaggacagttttgagagtgaaaggggaaaaagagcactgaaaaaataattagcaggcctggcatgatctataacgggtataaagtgggacacacagcctctctcacggtcactgtcagacttcagctttttcacactcaaatccacccccatgtttatcccatatactggagaaacgggtgttctcctgagctgagttttggggttttttccttttgttttgttttgtttttgtttttttaacatcctgtatactttttctcaatgaaccatgctcaaaaaaattagaggaaaataaaccataaaacagaaggcactgaaggattttgctgggactcagccattagtttgtttgatgagtatttatggagcgctttctaagcaccaggcaccaccagcgatactgggatgaatcagtaacatccctcacccttgaagctctcttgggcccattgttatttacttaaaatactatgcaagtacggagaaggggtgaagtgggaaaaaatcagttggttgtaaaggccagaatgacgggtctagtcccacccatgccatctgcaccctgtgtgatccaggcacatcatgttgcctctctcagcttcagtttctccatccaccaggcacagagatggcgggaatcgaggaagatgtggggagtatttcatcagcccaaaaagacttggctaatgcgaccataattctgccttctgcctctcctttcccagaaaaatagcttaatcatttggatttgggataaacacatttcctgtgtttattatttaaatgatccaccaagctgggcatggtggctcacccctgtaatcccaactctttgggaggctgaggagggcggattgcttgagcccaggagttcaagaccagcctggccaacatggcgaaaccccatctttactaaaaaaatacaaaaaaattagctgagcgtggtggtgcgtgcctgtaatcccagctacttgggaggccgaggcacaagaatcacttgaacctgggaggcagaggttgcagtgagcctagatcgtgccatcacactccagtctgggcgacagagtgagattctgtccctaaataaataaataaataaataaataaataaataaaataaatgatccaccaacaggaaccccaggaacatttgtattgactatgcaactaatgcttagtgagcacctactatgtccctggtgctgatctggacactgggatttagacaggaaaaatctctaccctggaggagctgatgatcaagatgacaatcttgaaatgcataagttgacaagatgattcagacagtggaacgtgctgggaagagaatgagatgtctggctgagctgcaggaaggggcaagtccttttgattgagaggtccaagaaggcttctctgatgggggcacaatggatctaaggttgagtgataagaagaaattggccaagccaagacctaaaggcagagttgctccaggcataggttcagagaatggaaataattggctgattgtgatcttgaacttgacctttcttttcttctgctaactttgggtttggtttgttcttgcttttctggctccttgaggtacgtgttgggttcttaatttgtaattttttttttttttttttgcttttttgagacagagtctcactgtggtgcccaggctggagtacagcagcatgatcttgactcactgcaacctctgcctcctaggctcaagtgaacctcccacttcagcatccccagtagctgggactactggtgcacagcaccacacccagctaatttttttatttttattttttagagatggggtctcactgtgttgcccaggctggtctcaaacccctagctcaagcgatcctcctgccttagccccccaaagtgctgggatgagaggcgtgagccaccacatctggcctctgttttttgtgatgtaggtatttgatgctataaacttccctcttagttgcttcttggccctttagctaaggtcaagtgtaaacttccctcagcactgcttctgctgcatctcacaggtgttggtgtgttgtgtctctattttcattcatttccaaaattttttaagtctccatcttaatttctgcattgacccaatggttgttcaggagcatgttgcgtaatatccatatatttgcatcatttctgaaattcttcttggtattgatttctagttttatcccacggtagtctgagaagatgcttgacagaattccagtattttaaaatttgttgagagttgttttgtggcctaacatgtggtctgtcttggagaatgtccatgtgctgatgagaagaatgtatgttctccatcagacatgcaagagacagacactttctcacctgcctcatgggatccataaaagagtcaatcagaagttggcatttaagaaagaccagaaggaggctgggtgcagtggctcatgcctgtaatcccagcactttgggaggctgaagtgggtggatcacctgaggtcaggagttcaagaccagcctgaccaacaaggtgaaatcttgtctctattttaaaaaatacaaaaattagctaggtgtggtggcgggcacctgtaatcccagctactctggaggctgaggcagagaatcacttggacccaggaggtggaggttgcagtgagctgagatcacaccattgcactccagcctgggcaacagagcaagaccccatctcaaaaaaaaaaagaaagaaaaaaaagaaagaaagaccagaaagaggtgaaggagcaagctacagagatatcaaactgtatcaatctggctgggcgtggtggctcatgcctgaaatcccagcactttgggaggctgaagcaggaggatcacttgagcccaggagttcgagaccagcctgggcaacagagaccccctctctacaaaatataaaaatttaattaaaaagatgtattggtcagggcagccaagttatgctgcagtaacaaacatccccaaagcctccatgacttttgacaacagatgtatttcctgctcatgctacatgtccagtgcaggttggcagtggggaagaagggggctctgttcagtgcagtcacttgagacctagctaatcacctagaacattgccacttgctattccagaaggaaaaaaggaatgctagaaggtcccacactgaaagttcaatgctctggctccaaaatgacagctatttccactcactcctcattggccagcacttagcatgtggtcctcagccaaccccaaagggactcaggaaggaccatcccaccatattgctggaaatatttgatggcagcattaatggggaacagtgttccaggcagtggaagtctttgagcccttggaagaaagacaaggcgatctctagagcacatccttcccaatattaatgaatttaacaaatgagcaagccatcctcccccactctccttcccgaattcagacttgtgcatatccctcccttaacttgaactgccaaagaagagatgagaaccaggagaagagatctgtgaccccatctttgctgatgaactaccacagaacagccatggcatctccagtccttgtgcttgtaaaatgtacttttcattttgctcctgaacgaaatccacccacccccacccccaaaccagggaaagctcatctcctaatccaaaactgcacccagccttccaccaccttcttccctgggaattgttgattccagagtatggaattgaataattggatgagtttggaagagaaaaagtgtctctaaaatcaggcagcagaagcccactccccagagaggatggtgcagatgagagttcaggagggagcttggcttggggttgacgatctgagctatgcagggaacttggacacacctctcaatcagtcattcaacagacaccacttattgagcaccgactgtgtgccagatgttgtcctagggggctgggaatacaggaatacagcagggaacaaaaaggacaaagcccctccctcttgtcgaatggacattccagccaggaagacgagagaacaagagaaataagtaaagtatataggcggtgaaatgcaaatgggaaaaaagaaacaatggggaccagaaatgaggggtgcaattgtaaagggccatcaggggaggcctccctcagaaggtggcatttgagtaaaaaacctgaaggaggtgaggggaaaccatgtagcaatctcaggaaagagcattccaggcagggagggacagcctgtgcaagggccgaggtaggactgtgcttggcgtggttgagaaactgcaaggaagccaggtggctggaaccgaatgagcgagggaaaaggggaggagataaaagcaaggagatgggagggttggaggccccctctgccattcagtaactgagtaacttcatttatttcctgtagcttgaaccacaaagaaccacaaatagagtagctgaaaacaacagaaatttatttattctctcgcagttcaggaggccaggagtccacagaccatcaaggtcagctgggccacagaccatcaagatgtcagctgggccatggtgcctcctgagacttggtctgaaatcccttcttgcctccctcctagcttctggtggtttgccaacagtgcttggtggtccttgtcttgtagacgtatcaccctgatcccgccttcatctccatttcacatggccttctccctctgtgcaaggttgtctctgtgcccaggtttctccttttcttattatttacttatttgtttgtttgtttctttattttagacacagggtcttgctctgtctcccaggctggagtgcagtggtgcgatcatagctcactacagcctcaaactcctggcctcaagcaatcctcctacctcagcctcctgagtagctgggactgcagatgtgagccactgtgctctgcccagatgtcctctttttataaggaaacccgtcatttaggatgaggttccaccctaatgacctgatcttaacttgattccatctgcaaagaccctatttccaattcataggtaccagggattaggacttcttcaatgcatctttttggagagacccactgcaacccacaacagaactgtgggcatgtaacttgacctctcggccaggcgtgatggctcacacctgtaatcccagcactttgggaggccgaggtgagtggatcgcctgaggtcgggagttcgagaccagcctggccaacatggtcaaaccccgcctctactaaaaatagaaaaattagctgggcatggtagcaagcacctgtaatcccaactacttgggagggtgaggcaggagaattgcttgaacccaggatgtagaggttgcagtgagccaagatagtgccattgcactccagcctgggtgacagagtgagactccatctcaaaaaaaaaaaaaaaaaaaatagacctctctgtgcctcagctttctcacccgggaggatggggataattatatacccactcctggggttcatgagaggattaaatgagctcaaacagtccaagcctccacgtgtgtctgttgtggtgctgggtagcatgtcctgtggccagaggttcccaagcttgtcgaggacccaggcaagggcagattcgggtcttgttggcagcacctgagatggacgggctgccttggtatggaagggcctcggctgtttttccctttcagtcctgtccctctcccccatcctccaccctgtccctgtcatctgagcctgctcctcgtgatggctcagagtctccctactggcggccggtgcagagtttcgttccctgggctatatttagccctgagaaatgggaacgagaaccctcagccgccaaagtgatggagagaggagcacaaagccagtgctgccttctgtccagcaatgttccgctgactcggttctttcttccagaaccttccagaagcaaagcattggcatttctgagctcgttaaaacaaggatgtgggctggtggctggcacattcattgtccccagaacctgtctgtgtccatgattaaagctgactttgttagttttattttcagtgcttttttttttttttaatccatggcaaaacacacatgacataaaatttaccatcctaatattttttttaactttgtaacattttttaattgacaagtaattgtacttattcatggggtacatagtgacgtttcaatgcatataatgcgtagtgctcagatcagggtaattagcatatccatcttctcagacctttattgtttctttctgttaggaacattcaagctcctccttctagctatttgaaaccattaatatattgttgtcatcctaaccatttttaaggatacagtttcgtgaaattaagtataatacattcacattgttgtgcaactgtcaccaccatccatctcccaaacttttccatcttccaaatgtaactctgtccccactaaacgcgaactccctgttccccctcccccagcccttggcacccaccatgctactttctgtttttataaatctgacgactctagggacctcctataaatggaatcatacaggattttcccttttatgactggtttatttcacatagcataatgccctcaaggttcacccatgttgcagcacgtatcagcattttctttctttttaaggtaaagttgactattaaaaaaaaacttctgccgggctcagtggctcacgcctgtaattacagcactttgggaggccaaggcaggcagatcaggaggtgaggagttcaagaccagcctgaccaacatggtgaaaccccatctctactaaaaatacaaaaattagccaggcatggtggcgggcgcctgtaatcccaactactcaggaggctgaggcaagagaattgcttgaacccgggaggcagaggttgcagtgagctgagatcatgccactgcactccagcctcggcaacagagtaagactccgtctcaaaaaaaaacaactttttaagaattgaagtagaataaacatacagaaaaatccgcggattataagtgaagagcttgattaattgtcacaaactaaacacatccatgtaaccagcacacaaatgaggaaacagaaacttctcagccccagaagcccccctcatatcctgttcctagtcactacctccccgcaagggtacccctaccaggactttgagcatcattcaccagtttagcctgttttgtattttgcataaatgaagtctggcttcttttgcttgacgttaactttttaagatctcatgtgacctgtggcattgttcattgcatgtatcctctctctcctattgataacagtgtggattgtttgcaatttggagctatgatgaataccattgctatgaatgttcttgtgtgtgctttctgttgtgtaattattcagaattactatttcggaattactatctaattgtagtgatcttggatcagtaactatccaagaattactgggtgttggcaaaggtacatacagttatacactgcacaatggcattttggtcaacaacagatcaaatatgtaacagtggtcccataatggaccgaatacataacagtgattatcatacagtatttttactatagcttttctgtttttagattcttttttttttgagacgaagtctcgctctgttgcccaggctggagtgcagtggtgtgatctccgctcactgcaagctccgccttctgggttcacgccattctcctgcctcagcctcccaggtagctacaggcgcccgtcaccaggcccggctaattttttttgtatttttagtagagacggggtttcaccatgttagccaggatggcctcgatctcctgacctcatgatctgcccgcctcggcctcccaaagtgctgggattgcaggcgtgagccaccgcacccggcctgtttttagatatttttagatacactatagagttacaattgcctacagtattccatagaataacatgctgtatgggtttgtagcctaggagcaataggcgagaccatgcagcctaggtgtgtagtaggctataccatctaggtttgtgtaagtacactccatgatgtttgcacaacaaaatgacctagtgacacatttttcagaatgtatgcccattgttaagcatgacttaattttagcatagaaactctcaaccaatttttcaagtagttgtaccatgtgttatgggttttattgtctcaccccaaaattcatatgttgaagtcctaacccccagtacctcagaatgtgaccttatttggaaatagattcattgcacatgtaaaggttttgccattggcaaaactgccgttatttttgcaccaaccatagcagttaagatgagatcattagggtgggtcctaatctaatacgatggtgtccatataaaaaggggagattttggcacagagacaggcacactcacaggaagaatgccatgtttaaacaaaggcagagctcaggatgatgcctctacaagccaagaatcagcaaagattgccagcaaaccgccagaagctaggagagaggcataaaacagattctgtctcacagctctcagaaggaaccagcccttctgacaccttgagcttggatttttggcctctataactgtaagacaataaatctttgttgtttaagccacctaggttgtggttccttgttacagcagccacaggagatgaatacagcatggtgccctcccattggcagattatgagggttccagttgctccacagcttcacagacacctggtagtaatgacctcatcttaacttctttctcattttagcctttcttccaggcagcagcagtgtcatacatgcttttaaaggtgggcttttaaagccacacttgagagccctgcattctgcaggtgtcacagggtgatcaactattcaaaggctacccctgccctgacagctggaggcaaggcttcccagcacagaggttaagcccatggactctggggccaggtggttagtgcaaatcccatgtccactagtgaataactctgtgatcttgggctgatgattttgtctttctaagcctcagtttcctcaatagtaacatgggcattataacatagaggcatcatgaggattaaatgactaagtgagctaacatacataatgtgcttaggaaggtgccagcacaccataaatactctgtaagtgctggcttttatcattcttttctctctctctctctctctctctctctctctctctctctctctctccctctctctctctgtctctctttctctctccaccccccaacctcctctccttgattttcttcccctcatcttacttccttcttgctatagtgttctattttctgtttcagagagtattctatttgtggacttttttcctcttgaaaattgagctgaaacttctgagaattttttgtgattggcattaaggctgcagggaatggagcagggagacacttgaggaaagggctcatggaccatctgtctggcttggtgatttcaccaggccatcagactctgtggtcatgcatctcctctaaggggagtctatgactgtgttgggagaagagaaggaaccagggattaattaatccatttcaataggttttgtgttttgtttggtttactttttccttctccttctggactgtggtctgggaagtcctcttgtgtttcttactccattcccaggtcaattatgttatgtgaggagaacataattaagagagagctttaccctttggatgttttcttcagaaaacgttcctccatttccccctctgggatgccagagccccagaactccacaagccaagaacatttaagacagagccacaagagaaccgagcttccccttccctcacctgtcaggttctatctgagtcccagtcaactctcacctgctttccctcctcacaccctacagagcaacgatgcctcagggaacacttggaactggttgtacttcatccccctcatcatcatcggctccttttttatgctgaaccttgtgctgggtgtgctgtcagggtaagtttctgctactccccaccccatcccactcactcctctttgctaacttctttccaagtagaggccattgaagctttgttttcattcactagacagagaaaaggcttcttcccttgtttgggttaccagactgttattagcaagccatgcacaggtgcagaggttgtgtactgctaggggtacccagtgagagggttcatatgggctttactttctttacattttttttaaaaaccaatagtttgggtttacttctcccccattttccaaatataaaatcatagcatatgctctaacggtgtattttcctgacccatattgtcctctatccccaagatttttttggcttaatcataaatgggcttcatttttcttaccataagaagtctgggcacttgtatggtggctctatggcaccatcagcaaccccagattcttccagctttccattctgacatctttaccagaggcttccaatctcgtggatacctcatggtcttaagatggctgcctcacgccctccggatggccacttcatgttccaaacaggaaaaggaagaagggaaacaggaagaggtgggacctatggcagagaagccaacctgctgcagaaatctttcattcatggcttattggtctaacttaaaagagggctgaaataattattagccaaaagtatgaagagaatgagaatgaggtatgcagccagtggtggttggcatggcatggttttatcctttcggtttttttcttttttattgtttttttttgagacggtgtctagctttattacccagactggagtgtagggggcgatcatagctcactgtaacctagaactcctaggcacaagcgatcctcctgcctcagcctcctgagtagctaaggcaacaagtgtatgccaccatgcccagctacattttttatttttcatagagatggggcccactgtgttgtccaggctggtctcaaattcctggccttaaatgatactcccatctcagcctcacaaagtgctgggattacagacatgagccactgtgcctggcctttttctttacctaggcacagttgtcgggaaatgtgtgaagctggcagaagcacccatcactataatatcccagtcttttcccagaagtcctgactcctcctgttgaaaactcctgacctccagggacttctgaatccccaaacacacacacacacacaaacacacacacacacacacacacacacacacaaacacacacacaaacgtttcctaacattttcaaaacagccatactctggcttttctatgcttctccagggagtttgccaaagaaagggaacgggtggagaaccggcgggcttttctgaagctgaggcggcaacaacagattgaacgtgagctcaatgggtacatggagtggatctcaaaagcaggtgaggccctttcatcctggggcccagggatggagatcccaggccacggagtacaaagagagtcatgcagtttggagaaggctaagctgggagggttatgatgggaggagaaagagaacctgaattggtagtcccaaattttatcaacaagaatccagagtctgatatgaagaagtctaagatgaagccaggatctgacatcacgtaacttgaattctgaaatcagacgctggtttacatcccggccctgccactttttacccatgcaccacacatccctgtacctccgtttcctcagctgttacatggaggcgatggtagtgcctaagtcatagtactattggagtatttagtaaaataatctcagctgagtcacttggggagagaagtgcctgatacacggtaggcacatatttatttgttcagccatttaacaaacatttagggagcacctgctgtgtgccaggcactgatctaagcactgaggatatgggagtaaacaatacacaccaaatccctgccctcagagctctgatattctaatgagagagataaagcaaacaaatacatgtcatgttgggaactcccaaattcagagaaggaagataaaacagactaggaagataaaacagagtaggaagttggccgggcgcggtggctcacgcctgtaatcccagcactttgggaggctaaggcgggcagatttcctgaggtcaggcattcgagaccagcctggccaacatggtgaaaccctgtctctactaaaaatacaaaaattagccaggcatggtggcgcacgcctgtaatcccagctactcgggaggctgaggcaggagaattgcttgaacccaggaggcagaggttacagtgagctgaggtcgcaccactgcactccagcctgggcaacagagtgagactctgtgtcagagaaaaaaaaaagagtaggaagttagaggcagggtggtcagggaaggcttctctaaggaagtaccctctgagcagagagacctgaaggacgtgaagaaggaagctgtggggatgtcaagggaaggggcattccaggcagagacagcaagtgcaaaggccctgagctaggaacgtatttgagacacagcaaggaagccagtgcagctgaaacagagtgagaggtggggacagctggaggagaggaagacaggaaggtgatggagatcagatcaagcaggggcttataggctgtggtgtggacattggtttttattttgcgcgaggtggggagaatgttggctattgctactgttgcggaggtggggcttgaagtcacaaaccacccagcagcatgttttttggtcggttgagctgtcaccatcagtcagcagagaatgggggtggccgggcagacccttcttcctggtccaagggagaactcatcctccaaatgcaggagcttaactctgtgctcttcctcttcagaagaggtgatcctcgccgaggatgaaactgacggggagcagaggcatccctttgatggtaactgctctaaacccacctcaggggtgggtcccaggggagaagggagaagctgtggtggggagtcgggggagagcaggtgactggttctaaggatcttgcagagggtagacgttcctcttggaggaattttaggacttccatgcagagtttccctattctggcctccacttttttgttttaaccatggacctggttttttctgctttgtgccttggtttttctcatctgcaaaatgggtatgatataaacaataccctagctcacgagattgtttctcagaatgatattcgttatggcaaatagaacacctgggatagtgcctggcatggggtcagcacgtttctgtttgctaaataagtaataattccaccaataatccagtttactgtgaacggctgctgtctcccatgttagaaacttaacgagacagaaccatgactttctttcttttcttttttttttaattgagacagagtctcgctctgtcacccaggctggagtgcagtcacacgatctcacctcactgcaacctctggctcccaggttcaagcaattctctgcctcagcctcatgagaagctgagattacaagcatgagccaccatgcctggctaatttttatattgttgatagagatggggtttcgccatgttggccgggctggtcttgaactccttgcctcaaatgatctgcacaccttggcctcccaaaatgctgggagtgtagatgtcaattcatggtcccctggaaacctgaatatgaaaggagggaccattaaaaaggtgtccaaaagcccaacctccccagcatagctgggagtcaggggacagactgtaagagtcactgtgtatccaacctgaggcttcatgaaagtaaagtttcctagaatttagagatagggttggatgcggtctgtctgtggctcacatctgtaatcccaacactttgggaggccaagacaggaggaacacttgagcctgggagttcaagaccagcctgggcaacataatgaggttccgtctctacaaaaaataaacttagccagatgtgggggcacacgcacctatggtcccagctactcaggaggctgaggtgggaggatcacttgagcccaagaggtcgaggttgcagtgggcaccactccactccagcctgggtgacagagtgagaccctgtttcaaaagaaaaaaaaagaatttagagataggccagaataatatgtctgcaatataataataacagcaataagaaaaataatagtactccctgaaaaatgcaacttcttgcttgagatttatcttctcatactttagaaaactggttagacaggggctgggcgtggtggctcatgcctgtaatcccagcactttgggaggccaaggcgggtggatcacttgaggccaggagttcaagaccggcctggccatcatggcgaaaccccatctctactaaaaatacaaaaattagctaggtgtcatggcacacgcctgtaatcccagctactcaggaggctaaactacgagaattgcttgaacctgggagacggaagttgcggtgagccgagatcacaccactgcactccagcctaggcgacagagcaagactctgtctcaaaaaaaagaaagaaagctggttagacagggtgatgacttttgattaaaaatctgagagatttgagggaaataaaagaactggcactgcgtcccagaaggttataaaatgaattttattatcttagttggggaggggagattacctaactcccctaaatgagttaggtaatctaactcatttagggtacctaaatctttttattggaagtctacacctgaacttgtctgctgtggagcccctggggtgtatagcttgaatatgggggcagaatcccaaaattgcagcctgcctagcgagtatgctacaggtcaaggggtggactgttttcataagaaagtgaggtttcttagaatttaaaaatagaggctgagtggggcggctcacgcctgtaatcctagcacttttggaggccaaggcaggcaaatcacttgaggtcaagagtttgaccagcctggccaacatggcaaaaccccatctctactaataatacaaaaattagccaggcgtggtggtgcatgcctgtagtctcagctactcaggaggctgagggaggagaatcgcttgaactcaggaggcagaggttgcagtaagccaagatcacaccactctctgggtgacagagcaagattctgtctcaaaataaataaacaaataaataaataaaccagaaggaaaatagtggctgagggcccagacctggagtcggactgaacccgacttgattcttgtctttacccctttaagcaaagtgatagtgccaccttgaacctcagtttacacatctgaaaaatgggtatactattagttcccgtgagaacagttgccgtgagagttaaatccaaggacacactgtgtccatatggtctgtgttgcaaaaagggtaacgtctttttctcttgccatgtttccattgttggagctctgcggagaaccaccataaagaaaagcaagacagatttgctcaaccccgaagaggctgaggatcagctggctgatatagcctctgtgggtgagtcccttcctctgccacctatcagttgttcatcacctatcgcccaagagacatggtggggtgggggcagagggcttgcaaaccgtgctgcctggatttgggtctcagctccaccctttcccacctgtgcgtgtgtcctgggcagattacatcattatgggaataacatccgtgcctagcttctcattattttgtgggaattcaactaaatgatccccatgaagcatggcaaaccagcacctggcagggacgaagctcccagtcaagttggtgaatgtttgtgactcattcgggaagtattcatgggggacctgcttatattaggtgcttggttgcaaacaagacaaggcagtcacgaggctgagctgggaggatcacttgagcctgggaagtggaggctgcaataagccattattgtgttactgcactccagcctgggcacagaaaaaaaaaaaaagacacaaactgagccaggcacagtggctcacgcctgtaatcccaacactttgggaagctgagatgagcggatcacctgatgtcgggagttcgagaccagcctggccaacatggtgaaaccctggctctactaaaaatacgaaaaaaattagcctgtagttccagctactctggaggctgaggcgggagcatcacttgaacctgggaagcagaggttgcagtgagctgagatctcatcactgccctccagcctgggcaacagagcaagatcctgtctcaaaaaaaaaaaaaaaaaaaagacacaaaccaaatccctacctacatggagctcacagtccagtgcaggaaatagaaattaaacagagaattacacaaataaacctgtaatggtaatggcacttcagggagaggctctgggcttagcttgctctagaaggatggggagcagtcagggaaggctacctggaggaagtgacggttaagctgggaactgaaggatgggtaggagatcactgtggtggtgatagcagaaggaacagtgtgagaggcagggctcagacctttgccaccacaagggccagagttcgagggaggagggaacatttattctttcccttctcactcctctgtcctattgattcattggctgtgatgatgttgattttgaccttctaaagtgagaatgtattgttattgttgttgttgttctttaatgggtttttgtttttaatggaaggaagagcatccaggcagaggaaataagactggaataagattgaggggagaaggaatttaggctgcttgggaaactgtgtggccgcagtttagaggaagaaaggatggcaagagaaagaggaagggaggaagagaaggagggagagaagtgaaggaaggagggaagttagtacatccatgtgtttctgatccatagtttctgatccactatttcgtattccccttttatcgctcgcccctagtttataaccttattgctgagtttaggcataatttccattgcgatcacatatctcgtagggtggatacactatggtttgtttagccatagctctattatagggtgtttgagttgtttccaataatttctcttacgaagaacactgctgtgcacatttacgtacaatgactccccccaccctttgggcgtatttccttggggataattataggatcaaagatattaacagcttttcaactcattattcaaagagccattctgagtttcaaaaacatggaacccatttataaacctgccaagtatgcatatgttcatggattccccacccaggccatcgaatattaccaatttaatttcctttcccagttaagtgggtttgtaatgaaaccttaaagcttgttttcatttgcatttttaatttccagccaaaacacgcttttctttgtaatggagaactcattctgcttccactcgtgtgtgcatctgtttaatttcctgtaagcaaatgtcaagaattggagcgctcagtaggtgtcttgagtatttgatcaattatgtctgtctcacgtgttacgttacctccattgtttaaaatctgttttatgacgaggtacagtggttcacgcctgtaatcccactgctttgggaggccagtgcaggaggatctcctaagatcagccgttcaagaccagcctgggcaacataacaaggctccatctctgaaaaacaaaatgttgaaaaacttagccaggcattatggcacacacctatagtcccatctatttaggaagctaaggcaggaggatttcttgaacccaggaattcaaggttgcagtgagctatgattgtgccactgcactgcaacgtgggcaacagagtgagaacctgtctcttaaaaaaataaaataacatacattcttaaaaatctactttgctggccgggcgcggtggctcacgcctgtaatcccagcactttgggaggctgaggcgggtagatcgcttaaggtcaggagtaggagaccagcctggccaacatggtgaaaccgtgtctgtactaaaaattcaacaattagctgggtgtggtggcgtgagcctgtaatcccagctactcaggaggctgaggcacaaaatcacttgaacccgggaggcggaggctgcagtgagctgagatggcgccattgccctccagcctgggcatcaagagtgaaactccatcaaaaaaataaaaaatctgcatatacatatatatgtatatatatttttaatttttttaatttttttttttttttctgagatggagtcttgctctagcacccaggctggagagcaatggtgccatctcggctcactgcagcctccgcctctgttaacaaggcaggtgacattgcagctttctaaacagacccaaaacccaggccagtggcttgttctttcatagccacgtttgctacaggcaaatccaccaaaacccacctcatcagcctgattactcaaaaagacaaagaaaggagcccccaatctagccagtggttttctagaccaccccaaaagagatctctggaattccaggattctggcaaggaatcacatttagctttatttatttatgtaaagaatgcaacaatacaggctgggtgtggtggctcacgcctgtaatcccaacattttgggaagctgaggtgggaggatcgtttgaggtcaggagtttcagaccagcctaggcaacatagtgagaccctgtctctatcaaatattagctgggcattgtggcacacgccagtagtcccagctactcgtgaggctgaggtggatcacctgagcccaggaggtcaaggctgcggtgagccacagcatgcccctgcactccagcctgcgtgacagagacttcatctcaaaaaaaaaaacaaaaaaaagtaataatacagtaatgcatatttcaaagtaaggtgggagctatgtggtatttgcgttcacgttcacattataccacagtatgcacagtccttttttttttttttttgagacagtgtcttgctctgatgttcaggctggagtgcagtggtgcaggcatagctcactgcagcctcaaacccctggactcaagtgatcctcccacctcagcctcccaagtagctgggactataggtgtacactgctacactcagctaagttttttatattttttactagagatgggatctcaatatgttgcctaggctggtctcaaactcctggcctcaaacaatcctcctacctccacctcccaaagcagtgggattacaggcgtgagccaccacacctggcccacatgcagtcttatataattggtgattctactgcgctgttgaatcagttgataaacgcactataaagcaggttcattcctaattgatgaacttactgctgaaataaggaacttgaatcatttacatgaaaagttgagccatgttgctgaaaggatatcaatttttttttcttttttttctttttttttgagatggagtcttactctgtcgcccaggtgggagtgcagtggtgcgatctcggctcactgcaacctccaccttccaggttcaagcgattctcccacctcagcctccaagtagctgggactacaggtgcacaccaccacgccctgccaatttttgtactgttagtagagatggggtttcaccatgttggccaggctggtctcaaactcctgacctcaagtgatctgcccacctcagcctccgaaagtgctgggattacaggtgttagccaccgcgcctgacaggatatcaaatttcatttagactgcaggaatacgttcaagagatctattttgtacagcctggcgactgtattaataacaatgtattatatacttgaaaattgctcagagagtaggttttaagcattctcaccgtgagaaaagtgataagcatatgtaataatgcatatgttaactagctcaactgagccactccatagtgtatacatatggtcaaaatatcatgttatgcactataaatagatacagcctgtatctgtcaatttaaaataaatgaataataactttaaaaagaaaaataacagtatggctgggcacggtggctcacacctgtaatcccagcactttgggatgccaagacaggcttgaggccaggagtttgagaccagcctggccaacatggcgaaactttgtctctaataaatatacaaaaatcggctgggcatggaggcgggcgcctgtaatcccaactacttgggaggcagaggcatcacttaacctgggagatggaggttgcagtgagccaagatctgcactccagcctgggtgatagagtgagcctttatttatttctgtaaagaatgcaataatacaggcctggtgcggtggctcatgcctataatcccaatgttttggaaggccaaggtgagaggatcatttgaggctacaggcgcatgccacagtgcccagctaatacttgatagagacacggtctcgctatgttgcccaggctggtctcaaaaccctggcttcaaatgagcctcccaccttggcctcccagagtgttgtgattacaggtgtgagacactgtacctggcctgtattaaaaaaaaaaaaaagaagaagaagaagaagaggaggaaagaagaagaaggaagaaggaagaagaagaagaggaggaggaggaggaatgggaaggggaaggggaagaagaagaggaggaaggggaaggggaagaagaagaggaggaggaaggggaaggggaagaggaagaagaagaggaagaagaagacgaagaagaagcacaatgataaataagtaaaatgtggagcatatgaaaacaaaacaaaaaaaagttgatccattatgaatggaagctgccattgtaactctgcttttttaggaaaaccagaccccatttagatgattttatttgtttttaaaggcaggttcttgctctgtcactcaggctggagtgcagtgatatgatcatagctctctgcagcctggagctcctgggctcaggcgatcctcccagcttagcctcccaagtagctgggactacaggcaccaccacacccagctaatttgttgttgttgttgatgttgttgttgagatggggtctggctatgttgcccaggctggtctcaaactcctggcctcaagtgatcctcctgccctggcttcccaaagttctgggattacaggcatgattttttattaatttatttgcagctgacaaatggtaattgtgtatgtttatggagtgcagtgtgatgttttaatctatgtatacatcatagaatgattcagtcatgctaattaacacatccatcgcctcaccacctcaccgttttttgtgtgtggggaaggcattaaaaatctcttagcaattttgaaatatgcaacacattactatttattaataatgcaatataaatacacaataatgtattaatgcatcactaaatgcgatgcaatgcaatgcaatgcaatagatcactaaaacttactcctccagtctaactgcaacttataccctttgatcaacatcttctccttctcaatccctcctcctcccctgcagcctccaggaaccaccttcctgctctttctatgagatcaattttttttagttttaagctcccacatgtgagatcatactgtaattgtctttctgtgccagcttattttactcagtataatgtcctccagttctgtccctgttgtcacacattacagaatttctttcttttagggctgtatagtattctatttgtatacataccacattttctttatccattcatccattgtgggacacttagtttgcttccatattttggctattgtgaataatgctgaagtgaacgtgggagtgcagatgttctgaaaagacttaaatgtcagacctgaaatggtaaagatgctccaagaaaacataaggagaaagctccatggcattggtctcgggaatgattttttggacaggacctcaaaagcacaggcaacagaagccaaaatggacaaatgggatcgtatcaaactaaaaaatttgtgcacagcaaaggaagcgttcagcagaggaaagagacaacctaaggaatgtgagaaaacgtttgcaaacaatacatctgataaggagctaatatccaaaatatataaggaactcaaacaactcaacagcaagaaaacaacccaattaaaaatgggcaaagacagctactcgggaggctaagatgtgacgatcccttgagcccgggaggaggaggttgcagtgagctgacattgcatcactgcactccaccctgggcgacagaaggagaccgagaccctgtctcaaaataaaaaataaaaatgtgcaaaggatctgaacatacatatcccaaaagaaaagacatacaagtggccaacaggtatatgaataaaatgctgaacatcactcatcatcagggaaatgcaaatcaaaaccaccattagctatcacctcacacctgttagagtagctattatctttttgtttgtttgtttgttttttgttttttgttttgtttttgagagggagtctcactctgtcacccaagctggagcgcagtgttgtgatctcagctcactgcaacctctgcctcctgggttcaagggattctcctgcctcagcctcccgagtaactgaaattacaggcacacgccaccatgcccagctaacttttgtatttagtttcactatgttggtcaggctggtcttgaattcctgacctcaaatgatctgccctccttggcctcccaaagtgctgggattacaggtgtgagacactgtgcccagcctagagtagctattatcaaaaagacaaatgaggtttgttgaagttctaacccctggtacctgcaaatgtggccttacatgaaaatagggtctttgcaggtggtaatcaagttaagatgagatcaaacttaattagggtgggtcctaaatccaatgactgctgtctttataagaggagaagcaggctgaccaacatggtgaaaccccatctctactaaaaatacaaaaattagctgggtgcagtagtgcacacctgtagtcccagctactcaggaggctgaggcaggagaattgcttaaacccaggaggtggaggttgcagtgagcagacgtcatgccactgcactccagcctgggtgacagagtgagactccatcttacaagaaaaaaaaaaaagacaaatcataacaagtgctggcaaggatgtggggaaacggggatccatttacatcattttaataacacaggctctatatgggtggtattgagttcccagagttgccattacaaaatgtcacaaacccagtggcttaaaacaacagaaatttcttctctcacagttctagaggccagaagtccaaactgaaatcaaggtgtcagcagagccaccacgttccctcagaaggttttaggggagaatctgttccatggtattttcttagtttctggtgctgccagcgatacttggtgttcctcagttcatagatgcataattccagtctctgcctctgttgtcatatggtcttctttctgtgtttctgtatgcgatttcttttttttttttttttttctgagacaagtctcactccatcacccaggctggagtgcaatggcacgatcacagctcactacaaccccaacctcacaggctcatgccgtcctcccacctcagcctcccgagtagctgggattacaggcgtgtgccaccatgcccggctaatttttgtatttttagtagatacggggtttcaccatgttggccaggctggtctcgaactcctgaccttacgatctgcccatctcggcctcccaaagtgttgggattacgggcacgagcccaccgcacctggccctaattactttatttttttgtaaatttttttttgtaaatttcatgtagcctgagcatacagtgtttataatatatacaggagtgtacaataatatcctaggccttcacattcactcaccactcaactcactccctcaccaagagcaacttccagtcctgcaagctccattcatgccaagtaccctatgcagctgaaccaccttttctcttttatactgtgtttttactgtaccttttctatgtttagatatgttcagacacacaaatactatgatgttacagttgcctacagtattaagtacagtaacatgctgggcaggtttgtagccgaggagctacaaaccacgtagcctgggtgtggagtaggctacaacatctaggtttatgtaagttcactttaagatgctcacacaaggacaaaattgcctaacaatgcatttctcagaacacgtctccctcattaagccacacatggctgtattacaatttacatataattttaagcgtatataaattgccagaaatcaccagatgaatccttggcggtgacataccccttcccccaccatagaacattgcagactggcccggacgcccagtatctcatgcctgtaatgccagcactttgggaggctgcagcgggcagatcacttgaggttaggagttcgagaccagcctgaccaacatggcaaaacaccatctttactaaaaatacaaaaattattcggacgtggtagtgggcacctgtagttccagctacttgggaggctgaggcaggagagtcacttgaacttgggaggcagaggttgcaatgagccaagatcgtgccactgcactccagcccgggtgacagaatgagactctatctcaaaaaaaaaagaaaaaaaaaaaaaaaggaaaagaacatttcagactggtaccagttacaccggctcttgatcccttgaatgtggctgaccctgaactaggatgtacttcataataacacgtccggctgggaatacttagtacaaaagaaagagtataaaatatcttttgaatccaccttgatattgattccatgttgaaatggtaatattttggatgtattgggttgaataaaacatctcatgaaagtgatttttaaaaatctagaaattgtctgcaattataattccagaccacagagaaaaacgagagacaggaatgtatagaaaaagggaacgtgggacaaagtgagtatgaaattcaactaacagaagtgacagtgcctagcatggggtccagcacttagtaggtgttcaattaatattcatttccctctcccttaccagtgaagggtatgcctgtcgtggggaatgtgtcttcaggctgagtgatcaggaaggactttctcaatggctggcacgtgaacctagtcatgatttcagctcttgaggttgtactagaagatttatatccaataatcgtaaggtaccacttagcatcacgctaagatgtattaattcatttatgcctttggatggccctttgaggtaggaagtgtggttgtctccagtttaccaaggtggcttgcccaaggtcatctgctggttggtgattaagccaggttttcagtgtggctccagcaggagtgggggctggggaccttctacctgctgtggtttctctctctctctctctctctctctctctctctctctcgatctgtggaacatcccccctgtcccccaaggtcccaagggtcttatttcttttggccaagccctttggagacctgcagatctggacacatctttgagagtttcaggaactagggccagaaatgctgggcagggtcatgaggagctgccactggggttgagaaggtgatggacatgaggggaagggtctttgcagaaaggagaggcgtccctgtaagcaggtcacagccactgggcctggccaactgcagccgagtggaatgtgcccctgccccatgaccatatgccccaggtgtgcaatgtggcggcccagagcacacactctgaaccatcttgacacatcttcactggttactagacccccctcagcctgtttccttggctgtaaaatggggatgacgctggtccctacttcctagggctctgagcaggagtaagtagcttgtcgtataaaacatgttccctgcagtgcctggtgcctgctaaatgttccataaacgtcagctgttattttcattcaggggaagctgaaatccatattttcatggaaaatctcccagtttttaaatgtggaccaataatttcagctttcacaaacccagtatgagtcggtatggcccctagggtgccaactcaaaatctctgttgagaattttgctgataggaagtggcctccttggaggtgtttgctgtgtcctgtgtctggcaagtggggtggttttgataaacgtgctggatggatgtatgggtgaatggataaatggaggaatgaatggagaaacaaatgagcaaatgaataatgaatggatggatgaatggatgagcgaatggatggatgaatggatgagcaaatgaatgatgtacacacaaaggaatggataaatgatgaatgtgctaatgaatttaagaatgatgaaagaatgaatgaataaatgaacaaatggatggatgaaagaatgaatgaatgtactaatgaatgaatcaatcaatgaagaaccatttaaaaatgaatgcaactgagggtttataagaaaaggtatcttaagcctgggcatggtaattcatgctggaatcccaatgcttagggacgctgaggcgggaggatcgcttgaacccaggagttcaagaccagcctgggcaacacagggagacctcattgctaccaaaaacaaaattgttttaattaagcgggcatggtggtacgtgcctgtagtcatagctacttgggaggctgaggtgggaggatcgcttgaacccaggagttcaaggctgcagtgagctaggatcaagccactgcattccagcctgggcaacaaagcaagatcctgtctcaaaaaaaaaaaaaaaagatgtattttagaaggtaaattcaatctgtccaaaactgagctctgaccttcccctaaacctgtgcccattcagtggatgagagctccatcccttaaggggttcaccaattcatccattcctttgtatgtacatcattcattcaccttggctcatccctctctcttacatccacaccgttccatcagcaaatgttgaatctgtcttaaatgattcatcccaaatcctccccgcttaactaccacccaactccagcccccatccatcatcatcatcacttgcctggatgggttcagtcacctccagcctggtctcccagctcccgtcctcacctctcactgtctactctcccactcggcagccagagggtgcctgtgaacacccaaatcaggttccatccctcctctactcagaaccctccacggctcccccctcactcagggtaaaagccaaagtcctccttgtggtccaccaggccatgcatgatctgcctgtcacctccctgccttcaccaccttcctcttttcccctcaaccactccactccagccacactgacttccttgtgctcttccccaaaaatgtcgggcagacacattcatgcttcaggaccttaaatttgctgtttcctctacctaagatactaaagtgacaagtcaacacactcaccttgaccatgcaatttaatgttgcagcctaccctgtggactctccaagggctcccagtccctctgtgatgctttactttttctcttaaaaaaaaaattgttatttaaaagaacttgtctcgctgtgttgcccaggctggtgtcaaactcctggcctcatacagtcctcccattccagcttcccaaagtactgggattagaggcatgtgccactgcacccatcccaactttttttttcccatagcacttttcattttccatcccactgttaatttacttattacgtccactgtctgtctcctccccttagagggtcagaccccggaagtccaggctctgttgcctaatgtatcctgagcccctggaacagagcctggcacaaaataggtactcaataaatgcataagagcaaaactatatgtaggcagaggacacacccagcttattcctcagtgatcacttctaaagttaaatgtccatggaaaacagtctcatccacatctctttctggaggccttccaagcgtgctccatgcagctctgttgcctgcccctgcatcagggaatggaggctctgctttatcctgccctgtggtgtgactcccagaggcatcagatgtggctgggagtgggagacatggaaaattggctcctgcaacagagaactatcagccttcccatcaattggttacttctaattctgttatttttcaggggcactgtcttctcataagctccatctatgcaaaactaagcccatgggtcatgatggttccctcaggccagaggcttgctggagagactaatggatcccctggctaaaatctgtgcttgggctgcacattggttaatttcttctgaaggaacagcctgagcctgacattctccatcttttccctggcaggttctcccttcgcccgagccagcattaaaagtgccaagctggagaactcgaccttttttcacaaaaaggagaggaggatgcgtttctacatccgccgcatggtcaaaactcaggccttctactggactgtactcagtttggtagctctcaacacgctgtgtgttgctattgttcactacaaccagcccgagtggctctccgacttcctttgtgagtatcacccagccccacccctgccaactccctgatccctccctcacaccctttttccacttctctttctctggtagtatgtgtatcttctttggtcctcattgaatctgccctttcctttagccatttctataactgtcactggggccaatgttactgttgctatgacaatggaacccatctcccttagacctgagagctggaagctggaattcagaccaacaaatgctcctgtgattcctttctaagagagagggacagaggggtgctggtgaaggggatgttggaagagagacagagaaagacggagctcataagatagacagatagaaacagaaacatacatgtattaataatttttatgtacatctctggaaatgttcataacttatggttaagagaggatgccttagaaataaggagtggcttatatgttgccctcattttctctacttatttctgactctacttctctcttctttcaaaccttctgcttctttcctgttaggttggtgcaaaattaattgcgttttttgccttttttttttttttttttaaccacagttacttttgcaccaacctaatacttcctcccctgccctttttggcttccttattcattcatagaacatcccctccagtatctgcgagagcgttttgctccctcaaggtacaaggcccactaaggctttgccctctgggcctattcccagattctatgtgagttagcatgagatagtatcaaaattgagggccaagtgagggtgaggaaaagcagcaaaagatggggagatgtctgagcaggatttaaaaagtaaagagctcgaggaatcaacaagagcagcgactggggccaggcatggtggctcacacctgtaatcccagcattttgggaggctgaggtgggtggatcacttgaggccaggagttcaagaccagcctggccaatatggtgaaaccctgtctttacaaaaaatacaaaaattagccagatgtgatggtgcacacctgtaatcccagctactcaggaggctgaggcactagaactgcttgaatccaggaggcagaggttgcagtgagccaagatcatgccactgcactccagcctgagcaacagagagagtgtctgtctcaaaaaataaagtaaaataaaataaaataaaataaagagtagtgattgggcagtgaggggggcaggtggatgccctggctttggctcacaggccccaagtaaggacttctcaaaacgtcttttgcctactggctgtctaatttattcactgaccttctgacctggttcagaattgacttaggacagcaagaagagacagtctagtctttgacctagaaaggcccgtgagcctagtccaggccattgtcttcttataaccctccttgttcccagtcacgttggctgaccccccaggacacccctcaggaaccagttctccttcccagggccctgacctagtttcaaacttagtaattgtttttagtccctctggagtctcttataaatgaggactctacttcgtgttttaacttcctctaatactctatttttaatctcctatattctctctactaatcatcttgtacagtctgtcctggttcaggaacaagggactgagacttcctgcctgggtcctcagtgtctataaaggtcctttactcattcccactttccctttgagaaaactgagacacagagaggttaagtagattgcccaggatcacacattagcttggcatgatggcgggcgcctgtaatcccagctacttgggaggctgaggcaggagaatcgcttgaacctgggaggcagaggttgcagtgagcccagatcatgccactgcactctagcctgggcaacagagctagacgccatctcaaaaaaaaaaaaaaaaaaaaaaagatacacattaatttcagagatgtcaaaatataaacaaaaatgtatatcttggcatcagtgaagtgtagttgtttctctggatctcagactccacatctatgtggtagaaaccggatttgatggtcctgaaagttcttccagatgcaacaatgctaaggataagtaattctttcaagtcttgtgcatcacctgctatcatgtttccatggtaactgaggaacaagatctcagaaactcttcagtcctcccagagttacttctggtgggtctaggaatgtgtcagatgttacaaacagacttcctctgctgatattttggtcctaggaaccctagagttcccctcagacactaagatctccttagcgtcctataaataaggagaaattttggtgataaatactgtgaaggactttgacggtcagttcaaaacacctcttaaaagcatgacatagcaaacacccttggcaaatatcttagttcatttgtactgctataacaaattacccgagactgggtaatttgataagaacagaaatttattttctcacagttctggaggctgggaagcccaagatcaaggcattggcaggtttccctgtctggcgaaagctactctctgcttccaagattgcaccttgaacactgtatcctctggaagggaggaacactgggtccttacatggcagaaggtggaggagcaagagggacaaacttcctctgtcaacctcttttataagggcacctaatcccattcatgagagctctaccgtaatgacttaatcacctcctgaaggccccacctcttaatactgttacattggcaattaagtttcaacgtgaattttggaggggacacaaacatttaaaccatcacaaccaccaaacacaattagctttgtggccttaattagctatatgaaattcatggaagttagtttcagtcctctgtctctttcctttctgtatgctttctgctcctcagaaaccctcctcatctctcctttctatccattaagtacccacgcccttcctaactcctcatcttcctaccctaccaagaaagccctctcagaaaaggatctgatgtcagccatttatttgctggagcaaatgcatatccatgttttacccctccctgaggcatttgcaattttatgcttgctcatcaaagaacaaaaggctttgtcttactcaagactttttaggtcactcacaacacaggatttctaggggacataagacaagttttctgagttaggagaaaagccataccttaggtgggttgcctgtgtcgctccaactaagtacttaacttcaggattacaaataggatatcattatgatttctatttccttttatcctttggagctcagtcacgtagaagtagattaaatataattgttagatcacagcaccctggcattatggggccgttatggtccattgttattatgtgaattattcagttaattagtttattttttaaatgtgataaacacccaggaacccaccagtcaacacaaaagtccttggcaataatctatatccgatccttctcatcgaaccagggcaaaaactacaagatggagacccactgatatttttctcattccttttaaaatcggcctaaggttggttagcttgttggttggagggtagggcataattgttgctttttttttttttttttttttttagacaaggtcttgctctgtcacccaggctacagtagggtggcccaatcttggctcactgcaacctccacctcccaggtttaagtgattctcatgcctcagcctcccaagtagctgggtttacaggcatgtgtcaccacactggctaatttttgtatttttagtagaggcggggtttgccatgttagccaggctggtctcaaactcctgacctcagttgatctgaccgcctaggcctcccaaagtgctgggattacagacgtgagccaccatgcccagccagctcttcctttttaacagaggggaaactgaggcccatgggaaggacaccttggacagggcgtggccacagtgggtcatgtatataatcccagcactttgggaggctgtgctgggaggatcacttgaggccaggagttcaagaccagccagggcaacatagtgagacccccatctccacataaaaattttaaaaagaaaaaagataagtcagaagttgggtgtggtgacacatgcctgtagttctagcatgttggaggccaaatcagggaaactgtttgaggccaggagtttgaaaccagcctaacagcatagcaagacctcatctctacaaaaaataaaaagtttaaaaatgataataaaaggaaagtcagagccacctggaacccctaccctcagcaagcctaacctcctctctgtttcctccttctcccttctagactatgcagaattcattttcttaggactctttatgtccgaaatgtttataaaaatgtacgggcttgggacgcggccttacttccactcttccttcaactgctttgactgtggggtaagtgctcttgtttctaagagttcatttctccagctcttgcctggaatgacagatacctggacacattaaagggagaaaggtaaagtcacccctgaatatgagagactcagatggatgcagaaggaatgagaaaacaatcccaaacactggcaaggatacagtgtacccagaaccctcaaccaccgccagtgggaggaaaacgtatagaccccctttggaaagctaagtgggggacataagacaagttttccaagttgggagaaaagccatgccttaggtgggttgcctgtgtcgctccaactaagtacccaacttcaggattacaaacaggacatcaatatgatttctatttcttcttttcctttgtagctcagtcatgtggaggtagatgaagtataattgttagattacaacaccctggcattatggagccattatggtcctttgttattttgtgaattactcagttaattaatttattttttaaatgtgattaacacccagtaacccactagtccacacaaaacctaagtcctggagaataatctacgtccaatccttctcatcgaaccagggcaaaaactacaagatggagatatgacccagcattccattgctaggaattcatcctagaaaatctcacccagatacctaggagacacaggccagaatgtccctgcagctggaagtgaaattaaggttgttcgcaaataagtggagaatgcctggcccagggcagccctaatcatttaccatagtcctgttggtctcagaaaggcttaataatttatttatttttttttattttttgtttttattttttgtttttgagatggagtctcgttctgtcacccaggctggagtgcggtggcgccatctcggctcactgcaagctccgcctcccaggttcactccattctcctgcctcagcctcccgagtagctgggactacaggtgcccgccatcatacctggctaattttttgtatttttagtagagatggggtttcaccgtgttagccaggatggtcttgatctcctgacctcgtgatccacccgccttggcctcccaaagtgctgggattacaggcgtgagccaccacacccagccagcttaataatttataataactgaatgttgtactgttttctgccattatagaaaattatgttgttggagaaaacaaaatacatacaaacaagcaaaccttccctacataaatgacccaagtagttaaagaataaaaccaatttctttccattaaaaagaaaagaaagccgggtgtgatgcctcatgcctatagcctcagctattcaggaggctgaggcagcagaattgcttgagcccaggagttgaaaaccagcccaggcaacatagcaagaccctgtctctacaaaaattaataataattagccaggtgtggtggtgcacacctgtagccccagctactcagaaggctaaggtgggaggattgcttgagcccagcagtttgaggctgcagtgagctatgatcacaccactgccctccagcctggacaagagagtgagaccccatctctaagaaataaaagtaggccaggcacagtggctcacacctataatcccagcactttgagaggcggaggcaggtggatcacctgaagtcaggagttcaagaccagcctggccaacatggcgaaaccccgtctatactaaaaaaatacaaaaattagccaggcgtcgtggcacatgcctgtaatcccagctacttgggaggctgaggaaggagaatcacttgaactggggaggcagaggttgcagtaagctgagattgcaccactgcactccagcctgggtgacagaatgagactccgtctcaaaaaaaaaaaaagaaaaattttaaaatgtcctgagcaaccttgtttgtaatagttccaagtctcaatatccgtgtatccctttgctgtagaacagataaatattttgtggcatatctatataatgaaatactctgtgacaatcaaagtccaccaacagcagccacatgcccaacaacaggaatgaatctcacccatgtaacatggcacagaaggaggcaggagctagcaacgtaagtccatacagttcatgcaaagttcaagtggacaaaattaaactctctctctctctctacatatatatatatatatatatatattttttttttttttttttttttttttttttttttttgagacagagtctcactctattgcccaggctggagtgcagtggcgcaatcttggctcactacaacctccacctcccgggttcaagccattctcccgcctcagcctcccaagtagctgggattagaggcatgcaccaccacccccggctaattttgtattttttgtagagaccgggattcagcaatttgcccaggctggtctcgaaatcctgatctcaggtgatccacctgccctggcctcccaaagtgctgggattacaagcgtgagccaccacgccccgccttaaactgtattttttaaggatgatacttgaatacgttaaaaaggcgaggaccttgaaaacacaacgctcggtaaaagaaaccaaacacaaaaggtcaagtattgcataattccatttgtatgaaatgtccagagcaggcaaatccatagagacagaaagtagattagtggttgctagggtctgggtgagggagagtggggagtaactgctcatggggacagggcctcctttgggggtgatgaaaatgttttggaacttgatagaggtgatagttgcagaatattgtgcatgtacctaaaggcactgaattgtgtaattcaaagtgtgaattttatgttatgtgaatttcacctcagttttttttaaggtaagaaaatggttattacaaaattcaggatggtagttatatcacagtgtctctggaaacttccagggtatccacatgtccctttttattttattttattttttattttatttgagatagggtcttgctctgttgcccaggctagagtgcagtggcaggatcatgaccctctcctgtctcaaattcctaggctcaagctatcctccctcctcagcctcctaagtagctgggactataggcacatgccaccatgcttgactaattttttttttttttgtaaagtcagggtttccctgtgttacccaggctggtcttgaactcctgggctcaagtgatctgcccacctcggcctcccaaagttccagaattacaggcatgagccactgccctagccttctcctaattgttgacataggtagtagttgcatgacattcactttgtaattatgtgtttcaggaattctcaggcctgtgggagctcttaataaataaaaaagaggccaggtgtggtggctcacgcctgtaatcccagcactttgggaggccgaggcaggcggatcacgaggtcaggagttcgagactagcctggccaacacagtgaaaccccgtctctactaaaaatacaaaaaattagccgggcgtggtggcgggtgcctgtaatcccagttacttgggaggctgaggcaggagaatcgcttgaacctgggaggcggaggttgcagtaagctgagatcgcgccactgcacaccagcctgggtgataagagcaagactccatctcaaaataaatgaataaataaaaataaataaataaataagaggccgggtgcagtggctcaatgctttggaaagtggaggccaacagttggagagaccaaagcaggaggatggcttcagcccagaagtttgaggccagcctgggcaatactagcgagacactatctctataaaaatgttttaaaattagccagatgtggtggggcacacctgtaatcccagctactcaagaggctgaggtgggaggatcacttaagcccaggaggacagtgctgcagtgagctatgattgcgccactgcactccagcctgggtgacacagtgagacccggtctctatagataaatgaatggatgaatgagggggtcaaggatcctcacccggcttccatttggagggaggagtttggttgagttcttgcaaggttggtacctaggaaatgcttgccagttctggagcccagacactgtccctggacatgagaccaggttctctgccctaggttatcattgggagcatcttcgaggtcatctgggctgtcataaaacctggcacatcctttggaatcagcgtgttacgagccctcaggttattgcgtattttcaaagtcacaaagtaagtctttggggttcctggacatttgtacagggggtggggatgggggacatggtggggccgcctccagaaagttgggaaagtgagcctcgtgtttcgagggctgactccggggccctgcctcccccgcctggcctgagtcctcgcctggcctctgtcggcaggtactgggcatctctcagaaacctggtcgtctctctcctcaactccatgaagtccatcatcagcctgttgtttctccttttcctgttcattgtcgtcttcgcccttttgggaatgcaactcttcggcggccagtaagtccttcacaggaattccaactcctggttccctggggtcaggctcagggaacacacagtcccctccaccgtgcaggctgccttcctcgtagcccagacacccattgcggtcacccaaatgggcagggccctgggtaccactcagggtttcctggggacagagatgatggagacgttcgtttccttggagatgagatactgagccacaccctcagagcaccccgggtggggccaacgtgaaatgtctgtgtcctccctgcaggtttaatttcgatgaagggactcctcccaccaacttcgatacttttccagcagcaataatgacggtgtttcaggtacagcctccacctggccccacgggccaacacctctcagtgtcacagatgaaagtgcctgctccacatccaaggggcttccctgaactcctccttctctacctggccttttcacaccactttgaaacacagattttatggttatcattattcaattatggtgaggccaacagatcaggagatgaatgtcattggaaagatagtttgtggctgggcacggtggctcacacccataatcccagcactttggccaggtacggtggctcacacctgtaatcccaacgctttgggaagcccaggtgggcggatcacttgagatcaggaattcgagaccagcctggccaacatggtgaaaccccatctctactaaaaatacaaaaattagccgggcgtggtagcacatgcctgtaatcccagctactcgggagatgaggcacaagaattgcttgaacctgggaggcagaggttgcagtgagccaagatcgcgccactgcactccagcctgggcaacagagtgagactccatctcaaaaaagaaaaagaaaaaaaaaaccactttgggaggtcaagatgggaggactacttgaggccaggagtttgagacaagtctgggcaacatagtgagactccgtctctgcaaaaaaataataataataattagctgggcatggtgatacatacctcctagctactagggcagctgaagtggaaggattgcttgagcccaggaggttgaggctgcagtaagctacaatcacaccactatactccagcctgggcgagagagcaaagccctgtctcaaaaacgaaaagaaagtttgttatactcacagatcctcagagaaggagcacaccatgcaggaccaagcagagaagcaacagggtcaagcaggaagagaaggaaaatgtgggcaagaggcttgattgtggtttccatgggacggaatgggtgaggcagagtaaacagctcgagactggctagtttggatcatttcagtgggctctggggcagaggagctgttcctacttgtctaggacctggccttggggtgattagggcaggtggatagtgctgggaagataaaggaggtggttgggatatgggctggttgggatattgtttggtttgcttttaaaaagcctgctcagggctaaattgtttactacctctagggactggctagtgctggaccgggcagtccctccagagtcagcaagaccccagatgcatcagaataaagaaaataaaatgcgtggccaggccaatgaggtggttcatgcctgtaatctcagcactttgggagaccaaggcgggaggattgcttgagcccaggagttcaaggctgccgtgagctccagcctgcaccacagagcaaggccctgtctcttaaaaaaaaggcagagaaaaaaaatggctaatacacccatcaaatctgaagataccttggtctcatattccagggtgatcaacccaaagcaacttctgcacccatgtgggcgcattccctgaggcttgggactggcccagccgggaccttcagagcatctttggtggattctttctctttgagggactgagagtgtatagaaaatgtgacttcactctctccttctcctggggaggtagtttctaaatgagaccccaagacagggagttgaagaggaaaccttccatgaagggaagttctgagcccccacataagcgattttttttttttttttgagatggagtctcgctctgttgcccaggctggagtgcgacggcacgttcttggctcactacaacctctgcctcctgggttcaagcgattctcctgcctcagcctcccgagtagctgagactacaggtgcatactaccatgcctggctaatttttgtatttttagtagagacagggtttcactatgttggccaggctggtctcgaactcctggcctcgtgatctgcctgcctcggcctcccaaagtgctgggattacaggcatgagccaccacacctggcccataagcgattattaatagcactgatcgctagtcatgtatctttagctcagaggttctcacccaaggacaagtctgtcctccaaggacatgtagcaatgtctgcaagcattgttggttgtcacagctagggagagggtgctactggcatctggtgggtggagactaggaatgctgctcaatatcctacaatgcacaggacagccccaaatagaataatctggccccaaatatcagcagtgctgaggcttagaaaccctgttttagcagattcatgtttttggagttctttaacatttactttatcctcatggggatatggatagaaggaaggaagttggatcttttttaaaggagcatgtaggtgctgtttgaatatccccttggttctttcagtatgcatcagcacaacttgcgtctgtcaacacctaatcctttgccttggtctttctctggtcccctgctctgcccccaaggaactgcagtccagcagtactgtgaattttttgtgccacaccttaaaaggagcagccgttggtggataaataccccagctccctcaccctcaggtgggatgacccctagagctccccagcaagaccaagccccggttacctacagtggaaactcgcttgatcacatactgtttacgttccaccctcttttcccttttctcacttctcctctcccctactggtgcttcctgagatcacctcccagacaaaccacttgcacccgaacccttgttccagggtctgcctcaggcagggggaccccaaacgtgtccttgtgctacatttgtgctatccacgtagtagcttgtttaatcatcaccatgaccacatgaggaacacaggtaaatattaaaatcctgtcttagtctgctcaggcagccataacaaaataccacacactgggtggcttatacaggaaacatttattctctcatagttctggaggccgggaagtccaagatcaaagtgttagcagggttagttagttcctggtgagggccctcttcctagcttgcagatagccaccttcttgctgtgtcctcatatgtcaaagagagagagagagagttgtgatgtttcttcctgttctttttttttttttttttttgagacaaaaatctcaaaaaaaaatctattttttttttaggcaaatcacatttttttgtcacccagcctggagtgcagtggcacaatcatagctcactgcagcctcaaactcctaggttcaaacgatcctcccacctcagccccttgagtagctgggactacagatgggcaccagctaatttttttaaattttttgtaaagatggggtcttgctatattgcccaggctaatcttgaactcctgggctcaagtgatcctcccaccttggcctcccaaagtgctgggattacaggcatgagccatggcatgcggtctcttcctgttcttataagggcactaataccatcatgaagtcccccatgacctcatctaaccctagttacctcttaaaggccccatctccaaataccatcccatcataggttagggcttcaactcatgaatttggaggcgggcacaatttagtccataacaaatccccttaatcacatcaagtaagacagagttacaggagggtctgtgactcctccagggtcccattttcctagaagccaggctaagagccccacgacgcaggaacggccctttctactcgcaaacaaagagaaaagccaaggagaagccaacacggagtctggctctgcaaaccgggcaggattgttaaagacctcctgggctcggggatggggtgggcggattccggctccacagctgcatctccaaggggcccgtggctgagaggggggttggctgtgtgtttcttcctcccctttcagatcctgacgggcgaagactggaacgaggtcatgtacgacgggatcaagtctcaggggggcgtgcagggcggcatggtgttctccatctatttcattgtactgacgctctttgggaactgtatccttcatggagagagagaaggggacaggcctggacctctggcagaggagaggttgcaggggctcaagggagggtactgagagacccagatacccagggcccaagtggtgtcccaccagtggttgcttttcctgactcagacatttgcagacaccctcctgaatgtgttcttggccatcgctgtggacaatctggccaacgcccaggagctcaccaaggtggaggcggtgggagaatgtttctctggcaaagttaccacctgcccatggcagatcaggacgggggtgggggtgggggtgggggtgggggtgggggcatgggaacagggttagaacttttgccggggatgcaccatgcaaagagaaggcgcctctccccccactcccagaaacagactgtccctcatcaagcaaattctacagccaagagggtgggaagggggaaggcagtgaggtcgctgcaggaaacggatggcaaactcaaccaaaaggccgtttacagggagtaagcagggtttccaaggaatggtgtagcccccaggctagtggatgggagagggagtgctgttatggggacccagtcagagctggggccaaggaaaaagggctgccaccagccctgggaccttagagaacccagaaccatggcaaggcacagatggagtggccaataaatgtccccaccttctctcttcctctggcttcccgctggagcctccccttagccaaacgcagcatgttaagagctagcctccgtccagcctaagcctctccccaaggaccctattaagttaagattacatgtaacaggtacagggtcttcctctcagccctggggtctccctcagcattgcagccccacctccagtgcctcgaggtattcaggacatgtttgtgaaattgaaccaaaccaagcagacgttgccaacgctccatctgccggccctggcaggagggagagagagtttcccggccccagctcccagtggagggaagcggaagtctctgccatcccaagcacacggccacaagcctggccactgtggagctggctggcatggctgagccgagggctgatccagccatgagctcatccaagttccaagagtccatccttaggggctggtgcaggagggtagcagaaggggagggagaaaggccagttcgtttatctcctgggaggtgtggacattcctctccagatccacattctttctttcattgatcctacaagcatttcttggtcatttaatacgtgtttttaatcctattcagtcctcatggaaaccttaggagccaagttctctgagccccattttacagatttcatcattcagtaagcacttaatgagcacctactgtgtgaccaaggccctggtctaggacttagggattaagcagtgaacaaaaaaaggcaaaaatccctgcctccgtggagcagggattcaagaggggagacagacaagaaacaagataaatttgtaaacatacgtagcttgtcagttggtgataaacacaacagagaaaaattcagtagggaaagtcagggagagttggaattttagatgagatgtgtgtcgcacagagaggttgagagacttgcccaaggccacacagcagtaagttgtggagctgggatttgaacccaggccgtctgggtctgcagcttgtgctcttaactgctgtgtaccagttgcttgaatttgggcatgttttatgctcacttgggaacctgtgggaaatgcagattccagggcccagcactggttctatagattatttggggagcctgaggatctgcattttaggtgtttctgaggcagatggtccagagacctagctctgaaaaatgctgggaatggtgccaggaggggtgggggtggccctatgagagcagggtggccagccagatcccatctccatgttgtctctgacagtgtcctgatctgaccatttccaaggtggtaaggttgctccccgttccagtgattcggagcacagcgggagagctgcctgcaatggcatgacttttcttatgggcgggttcatttctggccatttctttctcgttgccttttctttgctttttctttgttggcttttctgttttacgaatgaggccctgcatgaaggctgaagaaggatttaaagtccaaaaacgtctttttctgtatgtatttttaaaacctcttcccccattctcctcctctctgaacctaaccaccagtgagcagcagcaccctgggcagttggctgtagcccaagtgccctgctctcctctccccaccgccttcctgtcatgggggctgggaatataaattcctctcctcattctccttctgggggctgttgacagtgcatggcaggggccatcggatgccaggctcttctgtgtgtgagggtagttggtgttttttgaaagttggttcagagagttcacatggctcagaaagcctagtgagaggaaaatctttgcactgctttccagctcattaagacaggatgcaggggccaggcatggtggcacatgcctggaatcccagcactttgggaggccgaaatgggaggatcatttgaggccagaagttcaagaccagcctgggcaacatagtgagaccctgtctctacaaaaaaaaaaaaaaaattaaatgtatacaggcatagtggcatgcacctgtagtcccagttgcttgggaggctgaggtgggaggattgcttgagcccaggagttcaaggttacagtgagctatgattgtgccactgcactccaggctgggcaaccaagggagactctgtctctgaaaacaaacaaaagaaaaaaaaataggctgcaggaaagtcttcattgtaggaagagaagggacatttttattttttgttatctggctgtgtgttaaaataggcttcataatgagttagatgtcaaacttatacacagaggggatagcaatacacttaaccaatagcaggtacccattccaattggggagccttggttctgattggtcgaaatatttcaaatgttgcccctggtcagcaacagggtcagaagtgagtccccaaggcctagttcatgttttgtgaacaaagattccacgtgccttttaggacgagcaagaggaagaagaagcagcgaaccagaaacttgccctacagaaagccaaggaggtggcagaagtgagtcctctgtccgcggccaacatgtctatagctgtgtaagtgcccctaatccctgggatgctaccctggctcctgaacgtccacactatcccaggcacagatttgggaagcagtgggggtggtccttgacagaactgagctttaggaagagacacttcttgtccttccacccactttcactcaataaatatttggttagcagctgttatgtacccagcactgttctaacttctggggatacagcattaacaaggaggaaaaaaaaaatcccacctgtgtgtagccattctagcaagggaaggagtcaataaattagataaataagtaaattatatattgtgttagaaggcgatggaactacagagaaagtaggggagggaaatagcaaatgctgggagtgaagagagttgtgattttaaacgaagttgtcagggaaggcatcacctagaataggggtccccagtcccggggctgtggactggtaccaggccgaggcctattaggaacggggctgcacagcaggaggtgaacagtgagcaagcaagcattaccgcctgagctccacctgccgtcagatcagcaggcagcattagattctcataggaacacaaacactattgtgaacggtgcatctgagggatctaggttgcgtgctccttttaagaatcgaatgcctgatgatctcaggtgaaacagtttcatcccaaaaccaccccccacacctaggtctgtggaaaaactgtcttccacaaaactggcccctggtgccaaaaaggttggggactgctcacctagaaggttacatggcctgaaggaggtgagggaggagccactggggggcctggggaagggcatcccaggcagagggaacagcataggcaatggccctgaggcaggaacatgcctgatgtgaaggaggcctgtgtgactagaatcgaatagtaagtgtgaggaggtgaaggcaaggaggtgacaagcagattacacagggccttctgggtcaggggggaggacttgggcttttgcccctagccaggtgggagccatggagggttcttgagcagaggaggctgggacctgactcagatgctcacagactcctagcattcagtggggagtagagggtggagagcaggagtgggaggctgagatgtgggttggttcgcctgggtcatccatccaagctacagtgcctagcaatgctctaagtcctgtgaccatgccactgcaggaaagagcaacagaagaatcaaaagccagccaagtccgtgtgggagcagcggaccagtgagatgcgaaagcagaacttgctggccagccgggaggccctgtataacgaaatggacccggacgagcgctggaaggctgcctacacgcggcacctgcggccagacatgaagacgcacttggaccggccgctggtggtggacccgcaggagaaccgcaacaacaacaccaacaagagccgggcggccgagcccaccgtggaccagcgcctcggccagcagcgcgccgaggacttcctcaggaaacaggcccgctaccacgatcgggcccgggaccccagcggctcggcgggcctggacgcacggaggccctgggcgggaagccaggaggccgagctgagccgggagggaccctacggccgcgagtcggaccaccacgcccgggagggcagcctggagcaacccgggttctgggagggcgaggccgagcgaggcaaggccggggacccccaccggaggcacgtgcaccggcaggggggcagcagggagagccgcagcgggtccccgcgcacgggcgcggacggggagcatcgacgtcatcgcgcgcaccgcaggcccggggaggagggtccggaggacaaggcggagcggagggcgcggcaccgcgagggcagccggccggcccggggcggcgagggcgagggcgagggccccgacgggggcgagcgcaggagaaggcaccggcatggcgctccagccacgtacgagggggacgcgcggagggaggacaaggagcggaggcatcggaggaggaagtaagtggaggtgacctcgaatccgcagaatgacggtaacattaataatgacaacagccaaagtagcacgtgctgtgtatttgtttataaaaatatattataaaatgctgtatttggccaggcgcagtggctcacgcctgtaatcccagcactttgggaggccgaggcggatggatcacgaggtcaggagttcaagaccagcctggccaagatggtgaaaccccacctctaataaaaatacaaaaattagccgggcacggtggcaggcgcctgtagccccagctactcaggaggctgaggcaggagaatcgcctgaaaacagggggcggaggttgcaatgagccgagatcacaccaccgcactccagcctgggcgacagagtgagactctgtctcaaaaaaaaaaaaaaagtgctgtatttggccaggagcagtggctcatgcctgtaatcccagcactttgagaggccgaggcgggcggatcacttgaggtcaggagttggagaacaggctggccaacatagtgaaaccccgtctctactaaaaatacaaaaattagtggtggtgcccacctgtattcccactactcaggaggctgaggcgggagaatcagttgaacctgggaggtggaggtaggttgcagtgagctgagatcgtgccatcacactccagcctgggcaacagagcaagactctgtctcaaaaaaaaaaaaatgctgtatgtttttgtttttttgacacagggtctcgcctgttgcccaggctggagtgcagtggcagtcatagctcagtgcagcctctacctcccgggctcaagccatccgcctcagcctcacaagtagctgggaccacagacatgtgccacatgcctggctaatttttgtagagacagtgttttgtagagacagggtttcactgtgtttcccaggctggtctcaaactcctgaactcaagcattccgcctgccttagcctccctaaagtgctgggactacagggttgagccaccacactcagcctaatttttttacctttagtagaaatgaggcctggctctgttgcccaggctggtccccaactcctggcctcaagcaatcatcccacctcagtctcccaaagtgttcggattagaggcttcacagatggggaaactgagagattgagtgagctcctcaaggtcattcctctaaccagtgtccttgaacccaggctctctggcaccagaggccttgagcatttcagggaaactattaagagaagccccactgtcgtccagaattatatagtcttctgtgttcttgctgtgtgacttttgcaaagtgacttcatatctctgggcctcacacaatggaaatagtgggatctaattgggtcattgccaggattgaatgaggtaatgtatgcaaagggcctggaagagcagctgacacataataagtgctcggtaaatttagagcatttttggccattttcagccaactctatttacctaatgctattctttggaagtttgaaaagccactctgttgggaggccaaggtgggaggatcacttgataccaggagttggagaccagtctgggcaatagaggcagaccccatctctataaaatataaaaaattaaacagatgtggtggcatgcacctgcagtcccaactacttgggaggctgaggcaggagggtcactggagcccaggatgtctaggctatgatgagctatgattgcaccactgcacttcagcctgggcgacagagcaaggctttgtctcaaaaaataaaataaaaaataaagaaaaagaaaaggcactttgggccgttagaattgaagggagagcagagtttcaaagctttggatgcagcgggatgtggtggctcatgcctgtagtcccagcactttgggaggccaaggtgggaggatccacttgagccccggagttcaagaccagcctgcgcaacatagtgagacctcaccttttaaaaataaataaaaatgttagaaagcttttgaggcatcttccaggccagcaacttatccattcagaaccagcatcctctttttcataacgacattttgtaatactttctagcagatgctatagtgattctgcatatagggactcaacaacttacccattaaaatagacatcgtagacattgtcctattacaaattaacctgctcttagtcctcttttatattaccatcagggcataatattgatttttttaatgatgggtttaagtgatcctgttgtatgacatatgaggtaggccagcacttctcaaaatctaatgtgtatgtgaatccccagggatcttgttaaaacacaaattgtaattccgtagggctaaggactcagtggagcctgagattctgcatttgcaacgagctcccagatgaggctgatactactggtccagggaccacattttgagtaatgagactctggaggacatagtgaagtaattctgatatgtacaccatacacaaaatcaccatgaagtgacaggcacaaatgatggctaactctgggttgtgtggacaattcaaaccacatgaggggagttgccagcagtgtcaagatgttccacaatgttgaacacctcttggcaaagttccatatacaaaagagtctagtctttcttccatttatttaatagttgcattgcaggaaaatgcaatgtatattaaaaacatacaaaaaatatgttgtgttcttatgtaaaagagttaggtttaaactaaaagcacaggatcaggtgcagtggctcccacctgtaatcccagtgcattgggaggctgaggaaggagaatcgcttgaggccaggagttcgagaccaacctgggcgacataaggagacctcgatctctacaaaagaagttttttaattagccaggtgtggcggcaggtgcctgtagttctagctacttggaaggctgaagcaggaggattgcttgagcccaggagttcaagattacagtgagctatgattatgccattgcattccaacctgggcaacagaacaagtccttgtctcaaaaaaaaaaaaaagaaagaaagaaagaaaaaacccaaacaaacaagcaaactaaaagcacaggtaattacaagcaagatttttcacctctttgagggacattagaaagtcatgaagaggaaaagataagtctttcccatatgggactgtcatgtacatggtagggtatttagtataactgcctaccattctctaagtgcctgcagtgcccctcaatcattatgttattaggtttccacgtagttctacaacagttttctgaaaaccattgttctaggtcattctttcgcttcaatcttctcctatgggtttatgcattcattcagttagtatttactaagtgcctactatattctaagctcatgctgtgagttcagtcacacaactgcaagtgaagtggtctgagacattctgagaaatacgaccaagaaactgctcccagggtctcagggcaggtttccagaggagcaatctgagaagggagtagagtgtttcagtctaacaacagcatgtgcaaaggccctggggtggaccagaaggaggccagtttgcaggacatgactagtgacgagaaagtgacaaagaaattgaaggtgcattgatgagactctggggctgtcagtcactcaggggaatgagagatcaaaacgggagtttaggtggaataaagtgtttaccacagcactctctgtatagtaaagaccaatgaagagccaggtacaggccagtgtgatggttcacgcctgtaatcccagcactttgggaggcagagacaggtggatcacctgaggtcaggggttcagaaccagcttggccaacatggcaaaaccctgtctctactaaaaatacaaaaaattagccaggcgtggtggtggacgcctataatcccagctactcaggaggctgaggcacaagaattgtcctgcgaggcagaggttacagtgagctgagatcacaccactgcactccagcctgggcaacagaacaagactctgtctcaaaaaaaaaaaaaaaaaaaaaaagccaggtacagtggtatgcacctgtaatcccagctactcaggaggctgaggcaaaggattgcttgagcccaggagttcgagaccagcctgagcatttagagaatgggaggccagtatactaaataccctaccatgtacaagacagtctcatatggaaaagaattatcctttcctcttcatgactttctagtgctcctcacacaggtgaaaaatcttgcttataattatctgtgcctttagtttgttggtttatttagggttttgtttgttttttttttttttttgaggcagggtcttgctctgttgcccaggttggattgcagtagcattgctcattttagagatgagcaagacctcatgtctaaaaaaaaaagaaagaccaatgattattaattactcttgctattattactaatattactgttattatcagccttattaacagatctactgttattgaaggaggcagagtgacagggacaaaatgtctctccctaacaatatgccaggaagagtttttgaaagacaacagtaaacattggaaactacaagagcagcaaagcctggttgtgaaaggcaaggactttggggcaggcagtcacattcctgccctatcacttccaggctgtgtgactttcagaatttcactcctctctgggcctccatttcctcatctataaaatgaagataagaatagtagctacctccttctctgggtataagatttaactgagccgggcgcggtggctcatgcctgtaatcccagcactttgggaggccgaggtgagcggatcacaaggtcatgagttcaagaccatcctggctaatatggtgaaaccccatctctactaaaaataccaaaaaaaaaaaaaattagccgggcgtaggtggtgcacgcctgtagtcccagctactcgggaggctgaggtaggagaatggtgtaaaacccgggaggcggagcttgcagtgagccgagatcgcaccactgcactccagccggggagacagagcgagactccatctcaaaaaaaaaaaaaaaaaaaaaaaagatttaactgagttagtacgtgtaaaatgctttgagtggttcctggcttataccaagagctcaataaatgttagcaattttttgtagcattttggggtctcactatgttgcccaggctggtgtcaaactcctggcctcaagaaattctcccactttggcctcccaaagtgctggatttacagacatgagacaccatgcctggccatgttagctattattaatatgaatattattaagtactcaatgaatgctatttttagcagtaatagtaagcactcaggaagtgtcagctaatactgttagtaatactctcatcaataaacataaaaagcaataaggacccagcttgcccaaatcccacagatggttcctgctccctctcttcttcagaggaagaaactatctccccactttcacccccatagcctcagctggccagacccccattctgaaccaggggagtactgctaattccattattaatagacacatcaaacaatctggccgggagagacattattcatttggctgataaagaggttctaaggctctttggaaataaaagttcatgaagattcatgcactttaagagaaaaaaattcaagatcagtcattcatctgctttaaaaaaagtggcaaagataaaactttatttgagaatataaaataataaaaagacattttcgttctctgttgtgacaaagccagtggccttcggaggtctgccttgtacatttttcctcttcttcagtcattccttgaggctttttgcaaacgtaccctgtgtttttcattctccagcatattgataattttttttttttgagacatggtctcgctttgtcatccaggccccggagtacagtggtacaatcatggctcactgcagccttgacttcctgagctcaggtgattctcccacctcagcctcccgagcagctgggactacaggtgtgcatgaccatgcctagctaatcttttgtattttttgtagacacagggttttgccacattgccaaggctggtctccaactcctgggttcaagcgatcctcccacctcagcctcccaaagtgctgggattacaggagcgagctaccttgccaggccgatcatatttttttcctttttattcactttgtcttctcctcattcctaccttcatctgtctttcagtggctcactccagtgaaaagtggactgacgcacattctatttcatataattcaatggctgctggccccagatcccccataccaggtggccgagcccagtggccctgcagggtggacaaaatgagggtggaactttcccagactgtcagtaaaaatctatggaggacagagcttctgcctctcccttgcaaccaggcagtgccttctcccaggcctatctgcttgcaaagggaacttttgccaagacctgctccactctagaattcttatctctgctgttcgcatcctaattccacctgcatctgtcaccatgacaacctgctccccaaaaggaacaggaagagagatgctggacttttgagctccacagtttatcctgcatgggggtagggagtggttaattacttagcactctaattcttacggtacccccaatgggcccaagttggtttttttaaaaaaaaacagtcttgctctgttacccaggctggagtgcagtggcacaatcatagctcactgtagcctcaaactcctggactcaaatgatcttcccacctcagcctcccaagtaactggaacaacagtctcgtgcaactacgcccagctaattttttttttttttttttttttttagagatggggtctcactatgttccccagactgatctcaaactcctgggctcaagcgatcttccttcctcagcctcccaaagtgctaggattacaggcgtaagccactgtaccaagctgccccattaaagctttgaacaccagagagcccagctcagctgttttccagctgggtaactctgggtaactttgcctctctgaacctcagtctcctcctgtgtgaaatggggctgatcactatacccatctcggatggtggtagttgcagggattaaatgagttaatacgtgaggtccttaggacagggggtggggacacgagataagcaataaacaggaactgctgttattatcacccccacataatccgatctcagggtctgagtgtgccccaggcaaggtgtccacagccctctgcagaaggatgcccaagtgatcagctggcacaagaacgccacgcacagcaggtgttatgcaactggccacctattccaggcagaggatgccagatccccagggagaagggggtaggggtgcagcttcaaagttttctgccccttttgagttctccttggagacactttggaaatgaaacctcccggaaattgatattaggcctctgcaggctgagcttgttaaaatttcccaacaaacagagccaacagacgctctacaaggaagcaaaaacaagacaaaacacattggcagacccttttccatctgctcttggtagatggtattcctctaagaaaatgccgccacgagtttctccatggcttcttgagctggtggccaaaggatttaggttctctttgaaattataacttaactgggcctgctttatggcagggatatcactctctgaaatgtgtatatatatgtgtatgtatatatatacacatatatacacatatacatacacagggccaggcgtggtggctcacacctgtaatcccagcactttgggcggccaaggcaggtggatctcttgagccccaggagttcaataccagcctgaacaacatagtgagaccctgtctctacaaaaattaataaaaataaccaggcatggcagtgtgtgcctgcaatcccagctacccagggtgggaagatcgcttgagcccaggagttaaaagttgcagtgagctatggtcataccactgcacttcagcctgggcaacagagcaagaccctgtctcttaaaaatatattattattattatacacacacagacacacacagacacacacacacattacagatgatgagaaaatactctcagccaggttttcatgatacacaacttctcaaaaagcatcacaagcaggttagaattagggatttctttgtggactgtccaagatgttgaggaaatattggtttagaatttacctcatttaggccagaaatggtggctcacgcctgtaatcctaacactttgggaggccaaggccaatggatctcttgaagccaggagttttagcctggccaacatggcaaaatcctgtctctactaaaactacagaaaaaaaaaaaaaaattagccgggtgtggtggcacaggcctgtagtcccagctactctggaggctgaggcaggagaatcacttgaacctgggaggcagaggttgcagtgagccgagatcgtgcattacacttcagcctgggtgacagagcaagactccatctcaaaaaataagatagataagataaatatatataatatatatgttatatatataatatagaaactacagaacaagtgatctttgtatgtttccagaatataacagcgggacaggcataggatagacgttcccattgcaaaagggagaaattggaagggataaagaggtcaccagtcctaagcaagtgctaaatccagcaagacaaatcccattaggtttcaaggcctgagaataatcctcggtgactctcagctcattaacatacttagttctcagagccagactcaatgaggttacggcccgcatgttatgggtcaggaactgaggctaagtaactcactggagattatgtggtaaagaaggtccaggatcattgcttcagtctccaggatatggggaaggttctactcctgttatcccaaattttaaaatgtgggaactaaggctcagagaggttaagcaaatcacacagggttgcacagctagtgatgttgctgagatttccctgtgtgtagtggctcatgcctataatcccagcattttgggaggctgaggcaagagggtcgcttgatcccaggagtttgagaccagcctgggcaatatagtgagacctcatctctacaaaaagaaaaattaaaaagttagccaggcgtggtggcaggcacctgaagtcccagctactgggaaggctgaggtgggaggattgcctgagcctgggaggtggcgattacagtgagctgagatcgcgccactgcactacaacctgggcgacagagtgagaccctgtctcaaaaaaaaaaaaaaaaaaagacattgccgagattcaaacccaggtcagcctgtcttctgaaatgtccctctatgacccactcacaaaactgagaaggcagaaagttgcttggacctgtctatttcccctgtgcagtctcagagaaacagtggaactgcctcggtttctccttccgggaagtattcatagaagcatcccacttacctactttggtctgaaaataaattagcttgtctctcttccacttactaaaaacaccgtgggtttttgcaagttaaaatgcaaaaataaaatgaggagaatggtgctggtagtttagccagtgggaagccctctggggaaagccagccttttatttattacttatttatttatttattctttctagatagatttatgggaaaccagggctgtgttgtccaggggtctgtagtccagaaggcatcagatgggctactaagtgagtctttgtccacctgtagatggcaagaggcagggcccaggtgtccatggcttggagaggcaggggttgatgggaggtttgaggctgtgggatctctcctggggcctcagtatcctcatctggataatggggacattctggccaggcacggtggctctatatatccagcacttagggaggcctataatcccagcactttgggaggctgaggtgggtggatcactgtaggccacgagttcaagcagcctgggcaacatggcgaagccctgtctctactgaaaatagaaaaactagctgggtattgtggtgcacgctggtaatcccagctattcgggaggctgaggcacgaggatcacttgaatccacgaggcagaggttgcagtgagccaagatcctgccactgcactccagcctgggcaacagagtgaggctctgtctcagttaaaaaaaaaaagaaaaaagaaaaagaaagaaagaaaaagaaaatgggggtattcatttatcatttgacagtaagtttacccagcattgactgtgtgagaggccctgtactaggcagtgaaaactcagctaagaataagaaagttaaaaacaagctgggcattgtggtttacgcctgtaatcccaacattttaggaggccgaggaggaagaatcacttgaggccaggagtttgagaccaccctgggcaacatagtgagacgccagtctctacaaaaaattgtaaaattagccagacatggtggcgtgagcctgtagcctcagctacctggaggctgagatgggaggatcactggagcccagaagttcaaggctgcagtaagctatgatcctgccactgctctccagcctgggcaacagagtaagaccctgtctgaaaaaaaaaaaaaaaaagaggccaggtgcagtggctcacacctgtaatctcagcactttgggaggctgaggtgggtggatcacttgaggtcaggaattcgagaccagcctggccaaaatggtgaaaccccatctctactgaaatacaaaaaattagccggtcgtagtggtgggcacctgtaatcccagctactcaggaggctgaggcaagagaatcgcttgaacctgggagccagaggttgcagtgagccgagatcacgccactgtacgacagagcaagaaaaaagaaagaaagaaagaaaagaaataagatgatggggagttgtggaaacctgtccatgggcacgtgaaggtcttgacctctgaccaagaagtgaacaggctcctctcaattccaggcactgcagggatctgggacatgacttctccatgaccaaactgtaccctttccttttcttttttgtttttttggtgacagggtctcactctgtcacccagactggagtgcagtggggcgatcacggctcactgcagcctcaacctcccaggctcaagcaatcctcccacttcggcctcccaagtagctagaactacaggcacacagcgccacgcccgtcaatttacacattttttgtagaaatagggtctcactatgttgcccaagctggtcttgaactcctggccttaagcaatcctcctgcctccgcttcccaaagtgctgggattacaggcgtgagccactgcgcccagcccaaattgtactcttgaaagatggaatcttagctaggatcctgaactgttgccttttatcctaaatcagttgttggttctttttcattcacttgccttcctcagagagaaccagggctccggggtccctgtgtcgggccccaacctgtcaaccacccggccaatccagcaggacctgggccgccaagacccacccctggcagaggatattgacaacatgaagaacaacaagctggccaccgcggagtcggccgctccccacggcagccttggccacgccggcctgccccagagcccagccaagatgggaaacagcaccgaccccggccccatgctggccatccctgccatggccaccaacccccagaacgccgccagccgccggacgcccaacaacccggggaacccatccaatcccggcccccccaagacccccgagaatagccttatcgtcaccaaccccagcggcacccagaccaattcagctaagactgccaggaaacccgaccacaccacagtggacatccccccagcctgcccaccccccctcaaccacaccgtcgtacaaggtgagaccctctgctctcacatcactgggcaggggacctggcgtccctggagccagaggctctgctgagtgaccctggactgtgaccccatctctctggcctcagtctcctcccctggaaaatgggcataggcgtagtttcctaccccacagggctgtggagggttcagtgagataatttgtgcacagtgcctggcacggggttgtgttcagtcgggttagcaatatcttctacgtccttccttcccaaggggagccaggaagccaccccatttgaggagcaatagggtcctctgatggaagcttgagggggtcagatgattgattctctcggcccagcactgtccaaaagaaatgtaacacaggccacatgcaaatgtcagtttaaactctctagtcgccacattaaaaaaggggccagatgtactggctcatgcctgtaatcccagtacttcaggaggccgaggtagagtgagccaagatggcacctctgtactgcagcctgggtgacaaagcgagactgtctcaaaaaaaaaaaaaaaaaaaaaaaatggtgaactgctgggtggattatgtcttaagttcatctagtgtcagttctatgtgagagattttcatgagtttgctggataaaggctttccatggtcctgagacctaagatcctaaggtcttgtcactgtgcccattttatagatgtagggactgaggctcagagaggctcagcctgcccgtgggcacataagcaggctgggctgcagaatggaagctccagaggctgatggctcctccccctgagtcaagagaggggtgctaatgggggcatgccatgcagtttatgggaggtctcagtatttctatctgttcagtgggtctcttggcactctccctacctgcctgcaagtgagggtgtgaaggtccaacgaggataggggcaggtctgtgttaatatcccatgagggccccaccgcactcaaggctatagagtggttgagagcaggctctcgggggccaggccgcctgggttccaaatgccagctctgccacttcctgctgtgtgaccttagacaagtcactttacttctctgtgcctcaatttcctcatctgtaaacaggagatcagaatatatcaacctcagggctatacaagggttcagtgatgtcataagatgcctggtatatacagcaggcactttagaaatgtcagccgcttcttgcctgccctgggagtacacaggagttcccagagacttgtgggaaattgtggagggagccctgtgttggttcttgtcccaacagtgaacaaaaacgccaacccagacccactgccaaaaaaagaggaagagaagaaggaggaggaggaagacgaccgtggggaagacggccctaagccaatgcctccctatagctccatgttcatcctgtccacgaccaacccgtgagtatggcccccagcaagggcagggggggcctggggctcccaccagggtggcggaagtcaggccagatagagggcaatgagtgagtgttgaccaccatgagtccagggatacctttgaacaagttgaaaatggatgctccttccgtaagtcaggtaagatgatttgtcacaatatactttgttggaagagacccctgtcctgccatccactagaaaatcattgttatttatgacaataaataaacaaatttgtcataaataaacaaataaatttgtcctaaacaacaaataaatttgtcataaataaacaaatcttcactgtgatgtaagaggcacccccttagaaatggctgccttgtgcagtacacagcctgaacaactgcacgtggcagccctaggacctgaactctgtttctaacctagactctgtaagggtttagattctgggcggatagtgtctgagttccatggccttctgtcttgggcatctttgaaatggatagactatttaggggagaaatttatcccatgaatgtcgtagtggctcggaggttgttttagaattgaatgtctcccagggatatttcttgaaagcctgaccgctcaaaatgcttcttgacaatgaaggatcatgtcagataagatgggggagaagctgctttctataatctgcctcttggcaactcaccctgggtagtaataaataaaagtacctttaaagtacttttttatttagttgacttatcgattttactaaggaaacacttatgtggtatctactcagtgccaggcactgttctgagtgccttaaaattttttttaatttctctgaggttgttactatgcttagctccatttgacagatgaaaaaactgaggtccagagacgtgaattcacctgcccaaggtcacacagcaagccagtgggagagctggagtttgagcccagacactggctctagcctccttgttcttaaccactcagctctgctgccattcacacaaccttatgaactatttattattggctccacttattaagaggttaactggcacatcccattggcacattcaaggctctgataaggcctgcaattcataatttcaataactaactttttggagcccctatcatgagccaggcataaattaagtcttgggtctcatgattttgtgaagtaagcactagtattacggctattttacagatgagggcaccaaggcacagaggggacaagtaacttgcccaaggtcacacagctaatttttaaaaagaaagaaagaaatctacttaacccatagattcacaatattgtttggccctgggacatttaatatcgaaaagcctttttatctcctacagaattaaggaccgtatttcttcaacctagcttggggatcaagatacttcaagagggtcgtttgggagtgataggaactttgctaaacagggcatgtgaatgtcttctctcaccgaggtcccctctgccttcttggggttccaggacccagagagggcccccacctggaggagtttaatagtttgttgtgtaggaggccttgggggttggagatctcagtagtggtaggtaacatgagattatggaagaaaagggtttgtgagcctgtggtctgagtggacctctgcacgcccatctgtctccaacagccttcgccgcctgtgccattacatcctgaacctgcgctactttgagatgtgcatcctcatggtcattgccatgagcagcatcgccctggccgccgaggaccctgtgcagcccaacgcacctcggaacaacgtgagtcccacagagcacaccccttcctagcctggctgctctgcctcaggccactttctcctgcatccaaaatgctcataggtagggtgggatgttggggtcacccctaggcatagcccttatggctgctggttgagaggggaagctctgattccttggggatgctcttgggagcaagacattccttgaggcagtttctctgtgagcctggtggggtggaggtggcccagagtgactggggctgaaaattgctggattctctaatggaggcgtgagactagcaggatatggatgttgcacattctctacatggaataggggggttactggggcaggggcggtgctcagaggtggtcccctccgcagtagacatttccctttgtacacgaagctttgaaagaaacaactatttggctcagaaacacagcctaagcttttggtttttatgaaagcaagcccctttgcggatggtgggtctgttgacaacccctgttaattgagcacttgctgtgtcccaggaagaaactcagcatgcagtatctcatttaatcctcacaatgcgcccccccaaccccccgcccaggcatccccatttgacagatgggaaaactgaggctcaggggaatgagagagtggtaagtggcctgtccagggtcacacagcagaattccaactctgcatcccccaaagctcccactgcttcccccaactgtctgcatttactaatcacctactgtatgctacggatgggtgtgcatagcccctttgagtcctgacaagcaggaatgagtgcatgcttgtggttgagatggggaaaccgaggcaccaacaggcaagggcgtgcctcagtcatgggctgcgggcagaggcttgaccccagggcctggtagagggtggactggtggctcctgtttccctccccagctccctcccccaacccttccctcccaacccagagccaaaaaagtgtgttttctgctggtccaaggctctgctgccctggctaagtaggttaggacccaggcaaagctggcgagccccatccctcaagcccgcccacagcttaccatgcactttcccttccttcccaggcctggcaggcccccctggggacctgatgggggagatggaaggaaataattagaacgcagctcctggaggaagctagagccagtgctcagcctcctcacagtccgcttagttgcttcccgcagcctggtttcccccaggggcctccaggagccaggcgtggggaggaggtgtccctggaggggtccacaaaccccctgctgacgcgaggatgctgaagaaggcgttgccttcggcagggagggcacaggcatggatgatccagggggcacggcagctcccagggctgaagggaatctaggcagtgctcagaccaggccccagggactgtttgcaaagagcgttcagctccccggccccctccctcgtccatctcgcagtcgaaacttctctacaagaacactgtggccccataacgttcacaccacgtaaccaccatccagggcaagaaatagaacaaaaacgccccacgcggcatgtgcctcctcgatcccccacccccaccgccttctttccctctagagctgctggggacactgtctggagacatttttggttgtcacgacaggaggggggaggtgctcctggcatctggtgggtggaggccagggatgttgctcagcacccgccgatgcccaggacagcccccactctagaggatgatccagacccaaatgtccacagagcccagcttgagaaaccctgccttaccggtaaccacgaccccagcttctggaatgagcgtttttggcttctctctttttcccacctgcacaggctttttttttttttttttttaagagacaatgtctctctctgtcgcccaggttggggtgcagtaacgtgatcatggctcactgcagcctcaacgtcccgggctcaagtgatcctcccacctcagccccccaggtagctaggaccacaggcatgcaccaccacacccagctaatttttaaatgcttgtagaaacgggcctcgctatgttgccaggctggtctcgaactcttgacctcaagcaatcctccctcctcagattcccagagctctggaattacaggcatgtaattccaattcttacatgcctgtaattggccaacactggccaattcttaaaaactgaatttatgtttgctcttctgtaacattcaataaatgagacacttctatgcttcgcattaaatgagtacatgttgcttttgcaggattgatgggcattcttttttttttttttttttttgagatggagtcttgctctgtcacccaggctggagtgcagtggtgcaatcttggctcactgcaacctccgcctcccgggtttaagcgattctcctgcctcagcctccagagtagctgggactacaggcaggcgccaccacacccggctaatttttgtatttttagtagagacggggtttcacactatcagccagactggtctcaaactcctgacctcaagtgatccgcccgccttggcctcccaaagtgctgggattacaggcgtgagccaccacgcccggtcaatgagcattctttatgatgctgttttgagatttactgtgtggcatgggatgtgttatccatcccctgttgacagatgtttgggttgtttctaagtgtgaatactgtccccatgccacgcccctcaacatgtttcctgagtcacctggacagtaatttctccaggaggccagatgcagtggctcacgcctataatcccagcacttcgagaggccaaggtgggagcaatgcttgaggccaggagttcaagaccagcttgggcaacatagtgagacccccacctctaccaaaaaaaaaaaaaatttttttttttttaattaaccgagcgtggtggtgcacacctgtggtcccagccacttgggaggctgaggtgggaggatcacttgggtctggaaggtcaaggctgtagtgatccatgttcataccactgcactccaacctgggtgacagagcgagaccctgtctcaataaataagaattcctccagggtataaaccaaaagcgaagtttctagagcatataatttgcaagtggttggcctcagtaaatgcagcttgaatgtttattggacaataaacacagtgaccctttgggaggccaaggcgggtggatcacctgaggtcaggagtttgagaccagcctggccaacatggtgaaaccccgtctctaccaaaaatacaaaaattatctgggcgtggtaacacacaactgtaatcccagctactcgggaggctgaagcacaagaatcacttgaacccaggaggtggaggttgcagtgagccaagatggcgtcactgcactctagccttggcgacagagcgagaccctgtctccaaaatatatataaataaataaaaataaacacagtgggccgggcacagtgggccgggctcgcacctgtaatcccagcactttgggaggccaaggtgggtagatcacgtgaggtcaggagttcgagaccagactggccaatatggtaaaacctggtctctactaaaaatacaaaaattagccgggcgtggtagcatgcgcctgtaatcccagacacttggaggctgaggcagaagaattgcttgaacccgggaggcagaggttccagtgagccaagattgtgccactgcactccagcctgggtgacagagtgagacaccatctcaaaaaaaaattaaaaaataaatgaacgcagtggcccttgcaccagtagctcatgggaactcctgttcttccacatccttgtcaacacttggtactgtcgactgtttcatttggccgatctgctgggtgtggagtgagatcttattggggttgtgcttggcatttccctgtaatgaatgagatcaagcacttttttggattagactgagccacaggaaataacattttcaaatagatgaaaaagatctaagtattaggaatacttgaacctaatttattggtcttttgatttcctcttgcacagcttattaagagctccagaattagattcacctgacccccacggcctgccctttcccagctccctctcttccttctttccttccattcattcctttagtaagtatttgataagcaactactatgtgccaggtactgagcgagccagggaggattgacagggtatgagatggtccctgcactcccagagcccacaaaccaccaggcctttgaccaggctgtgcccactgcctcgtgcacctgaaatactctcccaccaccatcccctctgcccacccaggtctttcaagccaatccccttgcaccagcccctccctccaggaagtcacctcaccctgaccccaggcactctggtctctgattcctcttcaagcaccacatataacaggaatataagttataaccacacagatcacagagcccagctcctccaggacccagtacagccccaactgttgatgcattcattcaacaaacatttcttgagcacctactgtattcctgaccctgtattataagctggagacgccatggtgacagacagacatccctgtccttgtggggctgacatttgggtgggggagatggacaatgagattatcagtaactacaacaaatgttcagggagtgataagtggccgggggtgtggtgggcagagggaaggagagacttcgtaaagaggatctcaagcaccaggagatggaatttaaacagccggtcaggggagtcctcactgggaaagtgttatttgagctaagtcataaaggaggagaaagacggaatcaaatgggatgtgggggaaagcattccagagagacagaacagcctgtgcaaaggccctgaggtggaagcatcttggggaacaaaaggaagtgagcaagggagagaatgagaggaagtgagggcagggagctgaatggtcagatcgtgcaggggcttgagggcctcggggaggactttgacttttatccctgaatgaggtgggagccacggaggattgtaagcaggggaaggatgtgcctgacttctttggtgttcacagcgccctctggtggccatgttcagtaatgctcagcccttgcagcttctgggtggatctgattttttttttttttttttttttagacagtctctgtctcccaggctggagtgcagtggcacgatctcggctcactgcaacctccgcctcccacgttcaagtgactgtcacgccttggcctcccaagtagctggaattacaggcacacgccaccatgcccagctaattttttatatttttagtagacacggggttttgccatttggttaggctggtctcgaactcctgacctcaagtgatctgcctgcctcagcctcccaaagtgctgggattacaggctcgagccaccgtgcccagccggtgtccaccccatgtctagcaccagccagacactgtgccggcgcaccctcatcttcaggcctgggtgacaccagaggtgtgctatggtgtgtcctggacaggggctgggccagaggacattgctcgtccaggcagaaacatcaggcctggggaggggcacaggaaaaatcaacctaccctggcaggggcctggccttgaagcaggaagagatgccgtggcaggaagttggccccagtgtttaaaaaaaccacgtagcaactatttctcgcccaggatgcccaggaaagcaagggtactgggggattagatccatcaccaagaaggatacagtcagccctgaacttctctggggccgcttctaatccactacagggcttggggcaaattttaaaaggtacccttcccgtgggttagcgaactggcctagtacagtgatttttttgttaggatttgctgccatctgctggacaatttcattcacaacatacaaatctgcagtatgaaaagagatgggaggggcccttgtgcagtgcacgccctgcgcaactgtatatagcagctgtgtttcctcttctgggtagaaactctgctccccagtaggcgatcgttagttttaccggggctctgctggaacaggccagtgatccactgctctcttgcttttatcccttacaggtgctgcgatactttgactacgtttttacaggcgtctttacctttgagatggtgatcaaggtgagtgcagattataagtgagaacacacggtaatttttttttttaagcaagtgcagggctgggcacagtggatcatgcctgtaatcccagcactttgggaggctgaggcaggcagatcacttgagatcaggaggttgaggccagcctggccaacatggtgaaaccccatctctactaaaaatacaaaaattagccgggcatggtggcacatgtctgtaatcccagctactcgggaggctgaggcaggagaatcacttgaaccctaggctgcaatgagccgatgtggaggctgcagtgagccgagatcttgccactgcattccagcctgggtgacacagcgagactctgtcaaaaaaaaaaaaaaaaaaaagagctgggattccaggagatcctgagcctccaagaatgccccccttgagaggatgagtctcccagaggattagaaatgcctggtgtgtttgaagagcagcaaggaagctggtgtggctgggcggagtgagagaacagtggggaaacgaaggacagagagatgagtggggaggtgagggggcaccttgtgccggggatcacagagagggctcttcggctcttactttgagtgaggtgagggccatagagtgttctgagcagaggagggacttgatccaggtgttcacaggtgccctttggcatctgtgggaagccagaggacctgtgagcaggtgatcacactggtccccatgggcgatgacggggacaggatcaggctggtgaccaaagaagaggtgagaagtggacagattcttggaaggttctggaaatagagccagtgagttttgctgatagagccaccaatgagggatttgggacaaagaggcatcaaagaggatcccaaagtttggatctaagagccggcaagccagagctggcttccatcaggcaaaggggggccgcctcatggggcaggggctccccactcctccctggagtcctctggccactgcccatccctgcaagatgaggtggcctcattggcttccctgcctctccccgagaggctagagagtgggtggcagcaccccagggtggggatcaggtgggggttctgagcaccctctcttctcccccacagatgattgacctggggctcgtcctgcatcagggtgcctacttccgtgacctctggaatattctcgacttcatagtggtcagtggggccctggtagcctttgccttcacgtaagtctcctcgcaagggttcctcttgcctcttttcccccaacccccagcctgggccacacatcggattacaggacatgttctcagggtctagggatggggtgtgtgggctccggggacgtgggagatatcagcatgccaccaggaagagcttcgatggctttttgcatgatgtccatggaggaagaaggagaagggaccccccctcctgccaaccttctacctcctcacacagcaacgggcctcagccacatcactggccccttgctgtgcagcttcctgtagactagcctcgccggaacatctcatccccctactactccacaagcgccgcccaaaccgctgtctctttggaaagtccctaaagagacaatcaggaaacgaatgtgcatgagaattctgaccccctccctatgcctgaaggccccgtagttgtagacctggtgactccctttgtgtgtctttcacttctcctggcagtcctaggattctctgccctctgaaaggccatgtgtcatcctgcagctccaagatggcgccccagttgtaggcagccatttcaggatggcacccaagctcttagtagtcatcccaagatggcatccaagttctgggtggccattccaagatggcccctgagttctgagctatcattccaagatggcctctgaatttggggtggtcattcttagatggtccctgagttccaaggtgaccttcaagttctgggtagccattccaggatggtccccaagctctgggtggctattccaagatggccccaagttctaggcagccattgcaagatggcccctgagttccagggtggcccccaagttctgggcaaccattccaaggtggcatccaagttctgggtggctattccaagatggcctctgatttctgggctaccatgctaagatggcctctggattcttggtggccattcttacatggtccctgagttccaaggtggccttcaagttctgggtagccattccaagacggtccccaagtcttggatggctactcgaaggtgacccccaagttctgggcagccatctcaaggtggcaccctagttctgggtaaccattccaaaatggcacccaagttctagggcaaccatttcaaaatggcccccaagttctgggtgactatttcaagatggtacccaacaggtgagtggccattagcccttagggccctgatagcagacttagcagtacattcctgaagttgtagacatttggagcgggatgaaaaatatctaatcagtctttaatcaagaaacaaatcttggggaccctggctgtgcccatcatggtgaatgattccctgacaggttttgaaaggatcttgacacattcactcccatcgtgagagaatcaggggcttcctcctgtgcctctgcctctaggctccctcctgagccaatctggaggggcccttgaatggtctccctcaccaaacaatgaggacttggtttgtcaggagggccaaaatagtggcccatttccagtagaagggctgttaagtaggccacacttagattcttctctgggaacacaatgaggtcaagttgtgttagaacaaaaaatctccagagtttttggatgcctcagagctggagatgtatcatgaaggttgggaggctgattatacttctttctctttctctttcactccttcctcctctttctcctctctttttgttcgtttactcttttctttttctcttctcctctccctccccacatccttccctctcctcaaagcttttcagtgtctatttgactactagagcaatgcacggtggcttacacctgcaatcccagcactttgggaggctgagacaggcagattgcttgagcccaggaggccaagaccagcctgggtaacatagggagaccccatctctaaaaaaaaaaaaaaacaattagccaggcatggtagtatgcctgcactagcagctacacgggaggctgaggtgggagaattgcttgagcccaggaggttcaaggctgcagtgagccgaaatcgcaccactgcaccccagtctggggaacacaggaagaacttgtctcaaaaaaataaaaagtttaaaaaattaaaaatcaatgaatttgctatttagaatattatgctttatatggttactgaataattttaatagtgatgagtacaaaaaaaacaggtttagcaagctgttctgtaggttaaaaagtaaataaataaataattaattaaacaaaatacaatgcacatcaaattaggggacaaagattgtgacgaataagacaaggagtccatgtctttaaaatatgaaaagcagttacaaatcaataagaaacactacttctcaatggataaatgggcaaaggacataaacagaaatctgatagaatgctggcaactagtaaaaatggaggtaaatcaacccttggaattcagagaaatgtaaaataaaaacgagatacaattcattccctatcaagttagcactgttcccgccgcacccccacacacacacaaaaaatgatttttttagctaataaacagcatatataagaatgtattataataggctgggcacagtggctcacgcctgtaaccctagcattttgggaggccaagggagggggatcacctgaggtcagcagttcgagaccagcctggccgacatgacaaaaccctgtctctactaaaaaatacaaaaattagccaggcatggtggcggatgcctgtaatcccagctactcaggtgggtaaggcaggagaattgcttggacccaggagatggagactgcagtgagccgagatcatgccactgcactccagcctgggtgagaaagcaagattttgtctcaaaaataaaaaaaggaatgtattataataaaatatacttttctccccctctatcacctatttaagcaggtccttcaagttgtcaggtagacatcatgctatgagaaaatttaaatcctgaaaagccagaatgttttaccaccctcagcctggaatgaatccttctcctatggaaataacctacgggtttctccacccctctctgcctttcagccccttccctccctctcccctccttttctttctccctctttctcttcctcctttcccctctcttccctctctcttcttccctctctctgtctctttctgttcgtctttctccttttaccccctctcagtttctatctttttattttcctctttctctctctctctccctctctttctctctcactccctgcactgttgatgacctatgtccttgggtgatgtgggcctcccctggaccgtgtagcttggagaaagctgaccctctgtcatcggtctggcaacagggacttggcccccctaccctgcattctgatgaggaatggtattcagacaaaggcagatcccaggacacaggaggacatgctcaggcagggacccccgcccctttcctctggggcaaggtctgctcagcagcctccaagattcctagggctcaagaggtggcaggtagctcagggcactagggcaggcagtggggtgaatatgtcactcatatccacctgtccacacacaatgcttaccttggccacctgtgcccaggggaatgggttttatcctgtgaatcctcccagtgaccaccactgagtgtggcacagataaatggtaccaagcccaagctgttcaggtctccaatgtcactttcctctcagacctctgttgtagctgacatactgtaatgctgaggagggccgggcacagtggctcatgcctgtaatcctagctctttcggaggccaaggcagatggatcacctggggtcaggagttcaagaccagcctgggcaacatggtgaaaccccaggcaacatggtaaaaccctgtctctactaaaaatacaaatattagccaagcgtgatagcaggcgcctgtaatctcagctactcgggaggctgaggcagaagaattgcttgaacctgggaagtggaggttgcagtgagccaagattgcaccactgcactccagcctgggcaacagagcaagactctgtctcaaaaaaaaaaaaaaatgctgaggaggtgactgtcccacctccatcctccgagttgaccatcacaatttagggaggggaatgacctacaaaggacccagaagcaagcctttcaattgttgagcttttgccattatgggccatcgtttacaacatgctgtttctaggttctctggaggtaaaattagcctcctcttttaaacaaagctaatctgcaaaagcgaaccaaaaattcttttccaccagagatcaattagcagaatgagctgggtgcgatggctcacacctgtaatcccagcacttggggaggccgaggcaggtggatcacttgaggtcaggggtccaagaccagcatggccaacatggtgaaaccccatctctactaaaaatacaaaaactagctgggtgtggtggggagggcctgtagtcccagctactcgggagggtgaggcaggagaattgcttgaacccaggaggtgaaggttgcagtgagccaagattgtgccactgcactccagcctgggtgacggagcaagactccatctcaaaaaaaaaaaaaaaaaaaaaaaacagcagaatgattcttttggggagttgactttttttttaatttctgagttttctttttaaatatcaagttatacaagggcattcaaattggcctacaactcacaggaatttggcagcctgtttgcagagtcaagcttttacattgttctcatgaaattggtacaggcataaagccacccttcactcttgaaaatccattttgaatgttgttgttttaattcttatgcaagaaaaggatctggatagggatttcaggccatcctgtcaaccctggcaggcttgtagatcatgcaggaactgggaggtgtgagattttgccagtaggatcctggcaagtgcctgggactctcccagggttttggaagagccgacggacatgagtccaacagggagcatctttatatcatggccgaagggatgagagaggagaccctcaaacctcacgcctaccacaccctccccaccccactgtcaagagtccatctggtactgctgttcctcccccagggcagggctgcaggcccagcacagctggccaggtgccttgatcaagccattcctgcacacctaagagccaaactgctagaaaaccagaataggagctactgcttttttccctaaaaagttttggaatcttctccccgttacaggtttctggcctcttttgcctgagaaggtctctcaccctatgaggactttgcttattgtctttccttgttatcggatagttggcacattggaaggagcatggatgctctgaggttctcagcctgagcgctgaactctccacccgccccccaccccccaccccagggtcctctgcttatttcctttctggtcttttaacttgctttgtctgtcctctgtgcatatcccctcatagacaaggctgagagccccacaagtattagattgaccttattgttttaagaaattgtccctccaggtctgtttgatttctctctagatgtgcaagtcctttagcctctctgtgcctcagtttttcccatctagatgaggaaactgcggcccagagggactgtggagggaagtaagtccgacaagatcactgaggttgggttcagctgtcagatgctacccatctcccagccctgaatacggaggctcacagtgagcagaatgatgctcagcagcctggccagcctgggttctttgaggcctggcagggctgcgagatccaggggaagggaataggggaagggagcataaggttattcccttccttgttgaaaggaaccttgccattctggcctgttggggtcaaagcaaggattcttcccccagtgctgtgattgtggcctcgtctccgatatgggagaaaactatccctgtggtcccaccaagggatgtattgaagctcttctgaagatgtccacccctcctgcacctcacccaaatatctgtgtgtgtgtgtcctgctcaattcactgactgtgtcccttgtatccatgcgtctaccataaacaccccatttcatgagccatcacacgtggtatcacgctctgtgcccatgcatcagggcggccaactgacatttctcagcagctggcagatcatgatcctgccctcaccgccaagagtccatctggcgcggctgttcttcccccaaaggcaggaccgcaactggcagagcgccttgatcaagctgctcctgcatacccaggagccaaactgtcaggaagccaaagatggagccctcaggctgctatctcttgatcctcatcttcaaaacagcccccacccctgaaggcattatttttcttgtgtatgatgaaatggaaagaagattagagtgcgagatacccacacctgggtttgaatcttagtctgtcttcccagctgtgtgcctgcccttgggcaggtcactctttttctctaggcctcagcttcctcatctggaaaatggtcataatggtgctgtcttcccataggcaaatgcagtgatgtccagaagactcccatattaaacctaaagtcagcagattaggcaaaaatcactgtcattgaaaactccctcaatcatccgtaaagaagctgggtgtggtgtctctcacctgtagtcccagctacttgggaggctgaggtgggagaatcacttgagccagggagttcaaggctgcggtaagctatgattgtgctactgcactccagcctgggcgacagagcaagaccacgtctctaaaaatataaaataaagccgggtgcggtggcttacgcctgtaatcccagcactttggaaggctgaggcagcctggcaacagagtgagaatccatcaaaaaaaaaaaaaaaaaaaaaaaaagtagaatctatatgattctacgtatgcaataattcctagatacactgaatttgagaaccccaagtcagactacaggaaaaggagatgagggggtgtggaggagaatccacttggaatatttgtagacatttaaaccattctgtgttttaaaaaatatcacagccgggcgcggtggctcacacctgtaatcctagcactttgggaggccaaggtgggcggatcacgaggtcaagagatggagaccatcctggctaacacggtgaaaccccatctctactaaaaatacaaaaaaaattagctgggcgtggtggtgggcgcctgtagtcccagcactcgggaggctgaggaaggagaatggcgtgaacctgggaggcggagcttgcagtgagccgagatcttgccactgcactccagcctgggcgacagagcgagactccgtttcaaaaaaaaaaaaaaaaatcactaacttccagaggggtcgtggatggaaaattccatagagtccgcttggcgacagggtttccgccattctgatggcggtcaagtctttctaacctggatctccagtcattgttgaaggcgcctaatgagccccaagcctgattccaatgaatcacgagaggaccagctgctaggtgctgatagctttccccaggcccgcatttgctcagagggcttcagagttgcttctaattccatcccaagtcagaactctttgctgaccccctccttcataaagagcaaagccaaggccatagcttttgttaatcaaacatcagaattccacagacctgagttggttggttgtttgttttaagagacagagtcttgcccaggatgcagtggctcacacttgtaatcccagcgctctgggaggcctaggcaggaggatcacttgagcccaggagtttgagaccagcctgagcaacataatgagacccccgtctctacaaaaaatggaaaaatttgcctgtatttccagctacttgggaggctaaggtgggagaatcacctgagccctggaggttgaggctacagtgagccaagatcccgctactgcactgcagcctgggcaacagagggagaccctgcctcaaaaaaaaaggagagaaggagagagacagggtctccctatgttgtccaggctggtctcgaacttctggcctcaagcaatcttcccaactcgtcctcccaaggtgctgggattatagctgtgagccacggcacccagtctgggcctgttttgcagatgaggataacgagaggcagagtcaggattcaaacccaggtcccctcaacttcaaagctcacaaccttttagacattctaaaaccttgcagctccacaacgcctggagaagaggggtttctccggctcttggcagtgactttccgtggtgaattcacctttggtaactgacagctttgcagctgtcctgctacctggaaatttggctttcttagtgctttcttgggcagtgccaggtgcctgccaagggcgggggactgaatggaggtgggggcggcttccagatggaaggatggacatcggccagcgccatgagcctgaggctcccccaactgctgcccgggcgggactcgggggtgctcaggggtgcgtgtgtgtacgtgcgtgttctgtgttcttttttctgaggccacttacgatctgtctctccctccgatgccacatcaccaggagcagtacacggtaaagtctctctctatctttctctctctctctctttctctctctctctctctcatattctgtctctcgtgatctgtcccctggtgcagcctcgttagttctgggcctgtttctgtggccttgtgtccttgctgccgctgtcctgtcgcttcaaatgaccagaactcactccctgcgaaggaggcatcccaaagggtcttgccaatgcctccgcccatgccccaccagttcttgcagagaacagaaggggcagaggttcagtttcaataggcaagctgggtggagcagttatcagaagcaatgaaagtgggccagacacggtggctcacgcctctaatcccagcattttgggaggccgaggcgggtagatcacttgaggtcaggagtttcagaccagcctggtcaacatggtgaaaccccatctctactaaaaatgcaaaaaattatctgggcttggtggtgcacacctgtaatcccagctacataggaagctgaggcaggagaatcacttaaacctgggaggtggaggttgcagtgagctgagattgcaccactgcactccaccctgggtgacagagtgagactctgtctcaaaaaaatatataaaataaattgaacaataaaaaaataaaatggccatggaatcgttttcagatgaggagatgcagaatgcccatggagacatgctcccaattgtcacttgtttgggacatcaagattttagccagttccatgtgcaacctggatgtacagttccttgactttttttctatcaacatgtattctaaagttcaatttcaaaaggaaactttagccaggtgcagtggtgcatgcctgcagtcccagccatttgggaggctgagactgaaggatcacttgagcccaggagttggaggctgcggtgagctatgatcgtgccactgcactcccccctgagattccatctctttaatttaaataaaaaaaaaggaaactatattatccacttacaaccagcattgctaacctaagataaatctgcaactgcaaaagtaaatgtaggccagacatggtggctcacacctataatcccagcactttgggaggccgaggcaggtggatcacttgaggtcgggagttcgagaccagcctgaccaacatggagaaaccccgtctctactaaaaatacaaaattagccggacgtgatggcacatgcctgtaatcccagctactcgggaggctgaggcaaaagaatttcttgaacccgggaggcagagactgctgtgagctgagatcacgccattcactccagcctgggtaacaagagagaaatgccatctcaaaaaaaaaaaaaaaaagtaaatctaacagaaaccagacaatgttgttgccttcaagctgggctctttgttaaaaggaaaattactaagtgttagggaggtgttaaaggcctattagcatctacctgaggcttcctttctcgcaaaagcagagcgtctgaaagatacgtggaaaagaaacttaaagtataataaaaaagaaagaaagaaaaagaaatgattatgcccctctgagatccaattatttaatctgtgcccctgttctgcctaaaattatctcagtgactgtccaacgtgtgtctcacacttgggggcacagccttgagatgataatgatgatgttagttttaaaaagaaaaaaaaaggttcagagttctgaatcctggagtatatctctgcctagcaggctaaaatacaattatcgtctttgttccctgaaaaatgaaaaaaatggagtcctttaaaaagcaaatggtgtgaagaatgatgtttttgcactggatactgagacccatcgtgatgggggtctctggggcagctctgctcatgacctgggaggtcactgtagggagatgttttctaggtgacctccccacccaaatactccaaccggaggcattcacgtgtcctgagaccacacgccaggcgcaggctaggggctaggacaagaatcaagattaaaggggaaatggccaggtgcggtggctcatgcctgtaatcccagcactttgggagtcaaggccagtggattacttgaggtcgggagttcgagaccagcctggccaacacggtgaaaccctgtctctactgaaaatacaaaaattagccaggtgtggtgactcatgcctgtagtcccagctattcgggaggctgaggtgggagaatcacttgaacccaggaggcagaggttgcagtaagccaagatcatgccactgcactccagcctgggcaatagagcaagactccatctcaaaaaaaaaaaaaaagattaaagggaaaatgaacacagagaagagtagattacactgtaagcctttgaagagttttctgtctaaaaccagagaccgaagaaacaaacaaagattaactccgaaatagcacataggagctggcaggagccagaggtaggcagtcaggaaatgctgtcggagggagcaacaggtaatttgggctttgaggaccgggtagttctgtgactggagaagtggaggaagggcatttctagcagcgggaacagtatatgcataagcagacagaggcaaaagaatgtggctggggcttgagatatgtagccataaatgggaatgcaaaggtgaaggtaagttggactagattttcaagagcattgaatgccatgcccagaagtttgcacttgctcttctgagaattcacgtgctccagaagaattctgagcaagagaaagagtgacaaggtcattggctttagccactgtgtgcataaaacatggaagaaaaggcagggaatgaggagcaagttgggagacgggtgaggggggatggcacccaggaatggatggcgggatgttaaggaaggtgacccactggggatggggatggggatagagggcaggcagttgaccatgactctcaggtttctggtgtggacaactggatgggtcatgagtgccatgaaccacaagctattcatggtcccactcaataccctcctcttggggggcctgagtcatggttggccaagggtgtcatggcatctctggggtctgcattgctaagctcagttccaacagaccttggactgaacttctgtgcagtcctctctggcaaagatgggctcagagacccttggagcaatgcagcagagaccatggcagcagccacatcagcatctgaaaacagcggcacccggttattttccctccttcagactcagggaatatggtgggggaggggagatttggtataagggccactttaagtatcttccagaatcccattggaagggggagaaaatcccatttttttaagagcccactgataccacctttaaaaagaatacacagggggccaggcgcagtggctcacacctgtaatcccaacactttgggaggccaaggtgggtggatcacctgaggtcaggagttcaagaccagcctggccaacatggtgaagccccatctctactaaaaatacaaaagttagctgggcatggtggcacgcacctgtagtcccagctacttggagaggctgaggcaagagaatcacttgaacctgggaggtggaggttgcagtgagccaagatcataccattgcactccagcctgggcaacaagagtgaaactccatctcaaaaaaaaaaaagaatacataggggaccactaaactcctagaccaagggcttttttgaaaatagctgtgaccaggtgtagtggctcacacctgtaatcccagcactttgagagggtgaggagggcagattgcttgagctcaggagtttgaaaccagcctgggcaacatggtgaaacctcatctctacaaaaagacaaaacaattagccaggcgcagtggcgtgtgcctgtagtcccagctacttgggaggctgaggtgggaggatggctttagcccaggaggcggaggttgcagtgagccgagatcgtgccactgcactccagccttggtgacagagccagaccctgtctcaaaaaagaaaaaagaaaagctgtgcagaaatgggggtggggaatcagccaacccccttgtgctgggtctcagggacacccaatacagctgctcaggcccagccagatggcaaagggccctcaaccaaccctgggaccagaaccacaaaaagccacgtacttactggctcccgagcccaagcttaacaggtgaaatggaccactcttcaccaggaagggcagggctgtgccaagctcaccccagacttctaggcctgggagggtagggtcccatggagctgtgggctgccccctacccaacctgacctctgcttcctctcttcccttcttcccacctaaacattcctccacagtggcaatagcaaaggaaaagacatcaacacgattaaatccctccgagtcctccgggtgctacgacctcttaaaaccatcaagcggctgccaaagctcaaggtgagattgggagatggtggggtgcggtgggggggactgtcagggttatcatgtacagctgagcaggttgtacactgctcaaggacaacacattaaaggaggtgctgataacatcctagccatcgtgtatggatatttgtattattacaacttcccagcagatggcagtaaagtgagctgacctaaaataatctgtgtattatggcagtttttctttagatgaagtgtcttggggttaagatcctttttcctaattcgcatgaaggcatcatatggatttaaaagggtataaccgtgatctgggaagcaggaactagatttcttgttccataaaattttgacttttcatctacctattctaggctctagtatctcccattccaaaatagcatgaaccagcatttcccaaaagcctgtcattcaaaaacatatatatatattaagggaaataaaatccagtcattagagcacccactttcactctatgcttcacctgggggtccccagtattatctcttatgtaatatgtttctttaaatcaagtcacacccgtaatccctgcattttgaaagaccaaggcaggagtgttgcttgagcccaggagaatgagaccagcctgggcaacatagttagactctgtctctactaaaaattaaagacagaaaacagatactgttatggaaatctaaccaaatatggctgcctgcctaaggctttgtgcattgacaactgctctttcttggttaaagagggaaaatgtcaatggtaggtgttaacatggtagcaactaagtaaaaatttctccttcactcaaaaggattgagagagttggaaaggaagtaactttgttaccttgtttttctgtgttgggctcctgtatcacttaaaagcatctctggtatcccatctgggagttttagatccatagaatgccaggattgagtccaactcctccaacgcttatttctgaaagctggggggaccttaccctagtgacttgacttatgaccttgcctgtaaaatgggaatgatcatggcagtattttggtatgatgggccactggaggcagaaggttgggcaggtccccagcccctcatgctctctgtcaactccaccccacaggctgtgtttgactgtgtggtgaactcacttaaaaacgtcttcaacatcctcatcgtctacatgctattcatgttcatcttcgccgtggtggctgtgcagctcttcaaggggaaattcttccactgcactgacgagtccaaagagtttgagaaagattgtcggtgggtctccactttccagcacattcccattggaaccagcaggtgggcaggggggaagtggctagaggcattggccacttgggctcagagactggagaagtgatgagccttggaagtgactcagttgcaaccagcttggatcttgggtagaaagaaaaccggttttagaatttgagtcaccacccagagccacagaatgagtcataagcaaattgattgacctttcagccaccgcctttgtcatgtgagggatattaatacacatccacagttccttacttgaaatcgttacaggcagatgtgtttcaaagttgagaatattttgagattcccatgtgggacatgacaccctcagctgggtctaaggcagccctataatcaaacacaatatttctgccataaaatgtgtaactatttacatcaaatggggtaaataacaagtataaagagcttcatgtccaatcagatcaggtttcattaccaaataagttaggtaagaggccaggtgcagtggctcacacctgtaattccaacactttgggaggctgaggtgggaggatcacttgaggccaggagttggagaccaggttgggcaacataatgagagcccatcctacaaaataaattttaaaagttagcggggcatggtagcacacacctgtagtcccagctacccgggaggctgaggcgggaggattgtttaaacacaggagttcaaggctgcaatgcactatgatggtaccactgcactccagcctgcgtgacagagtgagaccctgcctctcaaaaatatatacatataggccgggcgcagtggctcatgcttataatctcagcactttaggaggccgaggcgggcggatcatgaggtcaggagatcgagaccatcctggctaacacggtgaaaccctgtctctactaaaaatacaaaaacctagctgggcatggtggcagacgcctgtagtcccagctacttgggaggctgagacaggagaatggcgtgaacccgggaggcggagcttgcagtgagcccagattgggccactgtactccagtctgggcaacagagccagactccatctcaaacaaacaaacaaacaaacaacaacaacaaaaatatatatatatatatatgtatatatatatatgtacacgcacacacacatatgtattatatgtgtgtgtgtatatatatgtatgtgtatatatagtgatattgttaccagtgtaaagtggcattttgcaacacatggtagcctgttgttatcttgatggctatttattgaaattaggaggatgccagatgtctggataggagtctggaactaacccttgtttcctgccttgaaaaggagtagcaacctcccttagcctgatgaacctctaaatgtcccctatgtctctctgcctcctcctaaactccctccaccccacccccagcaagcctgaggctctcaccctgaggactagaagttatcacgttggaagagggtgctggaccctgggtcagctctcccaccaggagtaaggttgtgccatcacccatggatttatctcaaagtagatgcacacgtcatcccctatgaagcacaggaacacatggtggcaggatggggagtcactgcttcccaagcagtctaggctggtggaccactcttcctttccctccccctgtctctgataaccaaagacaagtgcaagacagcccctctttcccatttactaacagtccccactctctgtggcagaggcaaatacctcctctacgagaagaatgaggtgaaggcgcgagaccgggagtggaagaagtatgaattccattacgacaatgtgctgtgggctctgctgaccctcttcaccgtgtccacgggagaaggctggccacagtaagtggcccgactggaaatctatccaggaggagccctggggagcaggaggataaagggcctgagagcttagcaataagaaaggtcttggaggccgggcatggtggctcacgcctgtaatcccaacactttaggaggccaaggcagatgtatcacttgaggccaggagtttgagatcagcctggccatcatggcaaaactccatttctactaaaaatcccaaaaaaaaaaaaaaaaaaaaaaaaaaaaaagctgccaggcatggtggctcacacctgtggtcccggctactcaggaggctgagacacgagaatcacttgaacccaggaggcagaggttgcagtgagccgagattgcaccactgcacttcatcctgagtgacagagcaagactatggcctccccgccttcaaaaaaaaaaaaaagtgaggctgaatcatggacttagtctttatttaaaattttgagccacttgtggtggctcatacctgttatcccagctactcaggaggctgaggtgggaggatcgcttgagcccaagagttcaaggctgcagtgagctgtgattatgccattgtactccagcctagacaacagaaggagacccctatccctgaaaaaaaaaaagaagaagaaattgatatttgttcatcatggactttttgcattaattttgattttttaaaatattggagcaaaagattatcttgattactgagattttcagtacccccttaatttgcacccaaaacaaatgcctccctccctcacctcgtccaagtaatggtctttctctcagaggtcttggaaatgccaggctggaagcttggtagattccagcatgtgccctcagcatcctcacctccctccctctctcagcaaatatgccaacctgaacatgccctactacccactctcagacacatccagtactcacacatgtgggaataatgctaacccacaaggcacctttgagcaaagtttttttaaacacctttctcaacagacttcatttccatctgtctgaaaatcatcgcaatagacttaaatgattttgttcaaacaaggcactgaaggaccacctgccaaaaaattgtcatcatgaatacacaaatctatcatgcctatcatgtgaaggtatcgcttagacacagagcctttgagcagtgtgcaacctgcactactgtacagagctgctgtgcacttacccactctcatatatatccccattgtacctcctgagcacccagcaccacctgtgctcaaatacccactctacatgcatacacccacctctactccctccattgccacaacctgtctttaaatcccaacttggccacttataagtgggtggtcttcagcacgtccctttaaattgctgaacctcaagttcctcatgtgcaaagtggagccagtaataacctccctgggagggttgctgagccggtggggatgaattgttgaatattgtttccagcacacagcaagcccttcatgcacagcagtagaaatgactgacattggccaggcgtggtggctcacacctgtaatctcaacagtttgggagaccgaggcaggtggatcacctgaggtcaggagttcaagaccagcctggccaacatggtgaaaccccgtctctactaaaaatacaaaaaaattagccaggcttggtggcgcatgtctgtaatcccagctacttgggaggctgaggcaggagaatcatttgaacccgggaggcggaggttgtagtgacccaagatcacgccgttgcactccagcctgggcaacgagagcgaaactccatctcaaaaaattaaaattaaaattaagaaataactgacattgttgtcagcctttcaaaaaacagcgactacttaaatttctttttcatttccctctgttcctgttctgccatctcacttccaccctctctccaccttcctcatcaccccttgggtccctgtctctctccttcctgccccttccctctccctgccccattccttgcagggtcctcaagcattcggtggacgccacctttgagaaccagggccccagccccgggtaccgcatggagatgtccattttctacgtcgtctactttgtggtgttccccttcttctttgtcaatatctttgtggccttgatcatcatcaccttccaggagcaaggggacaagatgatggaggaatacagcctggagaaaaatgaggtgccacttccaattccatctgtcctttaaaaactggggacacacacaaactttaaaacacacacaacacccaggaacccctttctaggggtacctgggggagggaacagaagcattgtcccaaccgaatccagtcttcagggcagcccttcatggagtttccagaggaaacacatcatatagtgtatgtatcagtcagtttagactaggttatgccgcagtaacaagcaaccccagatttcattgccaaatatccacaaagggacttattttttgctcacactgcatgtcaacatcagttgtggatcttgccatctttattctggttcccaggctggcagagcagcagagcagcctccctctgagatgctccagatgaaaaagagagtatgtcagactgaggttcagttcttcaggcttgtgctcaaaaattacacatgtcacttctgctcacatttcatcagccaaagcaagtcacacatccattctgacatcagtggagtgggcaaatacaatctcccctagcgaagggtggtgaatatttatgaatgaaaagccaagccaggtgtggtggctcacacctgtaatcccaacattttgggaagctgaggcaggaggatcacttgagctcaggagtttgagaccagcctggccaacatagcaagaccccatctctactacaaatcaaaaaaattagccaggcaggatggtgcacacctttagccccagtaacatgggaggctgaggtgggaggatgcttgagcttgggagttcgaggctgcagtgagctatcattatgccactgcactacagcctgggcaacagagcaagaccctctctcaaaaaaagaaaaggaaagaaaatccagtcccctgtctaccagagagtatagacatgactctttgcctctctggcatcatccaagctaaatagaggacctagaatatatcctctgctcccttgacccttaagacttaataaccactattcctccttctctctccctcaaagagaaggagaagacgcagcaaagtattcagtaagaaagaatgggctgggcgcagtggctcacgcctgtaatcttaacactttaggaggccaaggcaggaggattgcttgagcccggaagttcaagaccagcctgagcaacatagtgagaccccatctctatgattaaaaaaaaaaagttttaattagctgggtgtggtggtgcacgcctgtagtcccagctactcaggaggctgaagcgggaggatcacttgagtccaggaggtcaaggctgcagtgagctgtgattgcactgcactccagcctgggtgacaaagcaagcccgtgtcaaagaaaaaaaaaaaaaaaggaaggagggagggagggagggaaggaaggaaatgagagagagaaagaaaggagggagggaaggaaggagatagggaagaaggaatgaagaagaaagaaagggagcgaaggaaagaaggaagaagagagaaaggaaaggagaaaggggaaagggtggaaggaatgaagggaaggaaggaaaaaggaaagtgaaggagggagggaggaaggaaggaaaggagggagggaaggagggagggaaggagggagggagggaaggagggagggagagaaggagggagggagggaaggaaggagggaggaaggaaggaaggagggagggagcgagggagggaggaaggggaagaaggattaggcttcaatttgatttggcacactcggtagctgtgtcacctcaggcaagtggtttaacctttctaagcctctattttggtgatctgcaaagtgaggccattgatagtacccacttcccatgtttgtattagccatgcaataatggggaaatgtcagtgcaagttttggcagttggtgacatctcaagcaactgtagctgttgggataagaaagcaatggtgagaaggaagagagagcccaggaatcctggctgggggcaagagaggcagagactcaagcagaagcacttgagaaccgcgacgagttagacagagggtgcccggtgtacagccaccttcctcctgcctctgccgctctcaccactggcctctctcccgcagagggcctgcattgatttcgccatcagcgccaagccgctgacccgacacatgccgcagaacaagcagagcttccagtaccgcatgtggcagttcgtggtgtctccgcctttcgagtacacgatcatggccatgatcgccctcaacaccatcgtgcttatgatgaaggtaagtgccccacaccagcccccagcactacttaacccccacctcgttcctgcctctaccctgataaaatgaaaccatctgcagtttcccagacagaccacactctggatcacctctgagattttgttcctgctgttccctctacctgacacactgttcccaccactcccccggccagcttcttcttcccagctgtacctgcagacctcttcctccagaaagccttccctgaccacccaagactgcttgaggtgcccatcttagcaggcatcctatctttatgtcgcctgccacaaaaatctgcgtcaggttgcatgacagtgtcccccacccatttatgatgacctcagccctgaattcctagaggccaacaaggatctggctcagacggaacaagaagctctctataaatgtttgattaatgaaatgagggggctgggcgcggtggctcatgcctgtaatcccagaactttgggaggccgaggcgggcggatcacctgaggtcacgagttcgagaccagcctgaccaacacggagaaaccgcatctctactaaaaatacaaaattagccaggcgtggtggtgcgcatctgtaatcccagctactcgggaggctgaggcaggagaattgcttgaacccgggaggcggaggttgccatgagccgagatagcgcaattgcactctagcctgggcaacaagagcaagactccatctcaaaaaaaaaaagaaaagaaaaagaaagaaatgagggagaaggggtaggtgaggaccctaaaatccccagggctaaggagcggcttccaaaaaaaaactctgaaaacctttcaccctgtgctttggactccaaagcgtggattcaagcccagctcttccatttaattcatttacctttgtacaagcaaccagtgactttctggggactcagtttccctgtcaataaaatgggaatgataataagagcacatttgccccctccagaggaggtgagaggattgaatgagaaagttcatgcaaggaccttagctccttctcggcacttcaaaaacgatcaatagtggccgggcaaggtggctcacacctgtaatcccagcactttgggaggtcgaggcaggcggatcacttgaggccaggtgttcgggaccaactggccaacatggtgaaatcccgtctctactaaaaatacaaaaattagctgggcgtggtggcgcatgcctataataccagctgcgtgagaggctgaggcatgagaatcgcttgaacccagggggcggaagttgcagtgagctgagatcacaccactgcactccagcctgggtaacagagtgagactccgtctcaaaaaaaataaggaagccggggacggtggctcacgcctgtaatcccagcactttgggaggccgaggagggcgatcacaaggttaggagatcaagaccatcctggctaacacggtgaaacgctgtctctactaaaaatacaaaaagttagctgggcatggtggtgggcacctgtagtcccagctacttgggaggctgaggcaggggaatggcatgaacccaggaggtggagcttgcagtgagccgagatcgcgccactgcactccagcccgggtgacagagtgagactcctcaaaaaaaaaaaaaaaaaaaaagtataattcagccaagcacaatggcgtatgcctatagtcccgactatcaggaggctaaggtaggattgtgagttcaagcccagcctgggcaaaataggaagaccccgtctaccaaaaaaaaaaaaaaaaggttgggggaggtttttgtttttttggatgtgaaaagaagagcctagtccggcggagagcggggctttcctgaactgtgcctcctaccagtgaggttgctcagaccttgcctggggctggagtgttgcctggagaacagccatgaagctgcctccccacttcccacttcccacccctgctcgctgacccctgctactcctgcttctttcccctagttctatggggcttctgttgcttatgaaaatgccctgcgggtgttcaacatcgtcttcacctccctcttctctctggaatgtgtgctgaaagtcatggcttttgggattctggtaagtaccaccttggggctacagctatgggcttgggagaagcccaagggggaacaatgggtcctggatgatggtctcccaacgtggccccaagaaccccaacctcaagggtggcttcagtatcctgccagtggccacagatcctacttaggcattcttgtgtttgccaaggagtcccagggagacccaacctgtgagtgttaccatatggctgcttatgtatccagttcctcaaaatgatgggagtcatcatggctgggagtctttagcatccattttagagataagaaaactgaaatcaggctgggcgaggtgtctcatggctgtaattccagcactttgggaggccaaggtgggcggatcacctgaggtcgggagttcgagaccagcctgaccaacatggagaaactctgtctctactaaaaatacaaaattagccgggtgtggtggcgcatgcctgtaatcccagctactcgggaggctgaggcaggagaatcgcttgaacctgggaggcagaggttgtggtgagccgagatcacatcactgcactccagcctgggcaacaagagtgaaactctgtctcaaaaaaaagaaagaaagaaagaaaactgaaatcaggctgagcacagtggctcatgcctgtaatcctagcacttcaggaggccaaggcaggaggatcgcttgaagctaggagttctcaaccagcctgggcagcaaagcaagcccctgtccctacaaaaaaaaaaaaaatttttttttaattagccaggcatggtaactcgtgcctgtagtgccagttactcaggaggctgaggtgggaagatattttgagcccaggaggtggaggttgcagtgagctatgatcatgccactgcaccccagcctgggcaacagcaagactccatctttaaaaaacaaacacagaggtcaggcacagtgactcacacctgtaatcccagcactttgggaggcagaggcaggcaaatcacttgagcctaggagttcgagaccaccctggccaacatggcaaaaccccatctctactaaaactacaaaaaattagcctggcgtgcttgtgggtgcccatgatcccagctactcaggaggctgaggcaggagaatcgcttgaacccacaaagtggaggttacagtgagctgagatcacaccactgcactccagcctgagcaacagagcaagtctcaaaaaaataataataataaaaataaatatgtctttatttttcaccagccactaactaaattttaacatttccttccatcttaaagggagataacaaacccttagtattagtattatcaacccttaatattatcaacatgacctgtgtcacttataaacatcagatattttcatactgcattataagagctgcagataccttaacatttaatttgcattcatcattgctttaaaatgttgcttgtgattaaacctacagctagaatttgttactcagtgtttttttgttgttgttctgttttgttttgtttgagacagtctcgctgttgcccaggctggagtgcagtggcgcaatctcggctcactgaaagctccaccccctgggttcacgccattctcctgcctcagcctcccgagtagctgggactacaggtgcctgccaccacacctggctaattgtttgtatttttagtagagatggggtttcaccatgttggccaggatggtcttgatttcctgacctcatgatccgcccgcctcggcctcccaaagtgctgggattacaggcgggagccaccgcacccggcctactcagtgtgttaatggagaagtatattcattgttagatcgccatttttaaaactttttttttttttttgagacacagtcttgctctgttgcccaagctggagtaccgtggcacaatcttggctcactgaaacctccacctcctgggttcaagcgattctcccatctcagccttctgagtagctgggactacagatgcacaccagcatgccaggctaatttttatatttttagtagagacggggtttcaccatgttggccaggctggtctcgaactcctggcatcaagcaatctgcctgcttcagcctcccaaaatgctgggattacaggcatgagacactgtgcctagccttaaaaaatattttgatagctattttattacaaaaggtaaccttgaagcccttgctattttgttatgcatttacaagcctttatgcataaaataaaatagccagcactattctcacatggccaaggttcatagcacacacacaaaagtatagttggctgagtgcggtggctcacacctgtaatcccaacactttgggagacagaggtgggtggatcatgaggtcaagagatccagaccacccttgccaacatggtgaaaccccatctctactaaaaagtacaaaaattagctgggtgtggtggcgcatgcctgtagtctcagctactcgggaggctgaggcaggagaatcatttgaacgtgggaggcggaggttgcagtgagccgagatcttgccactgcactccagcctgggtgacagagtgagactccatctcaataaataaataaattaaattaaattaaattaaaattattttttaaaaaattgggggctgagtgtgatggctcacacctgtaatcccggcagtttgggagcttgaggagggcagatcccttgaggtcaggagttcaagaccagcctggacaacatggtgaaaccccgtctctactaaaaatacaaaaattagccaggcatggtggcgtgtgcctgtaatcccagctactcgtgaggctgaggcccaagcatcgcttgaacctgtgaggcggaggttgcagtgagccaagatggcaccagtgcactccagcctgggtgacagagtgagactttgtctcaaaaaaaaaaaaaaattaaggtgaagaaggcttatactagtgggctgggacttgaagtgaagtgaattcttgaaggtccccagtgagtggccaaggtgggacttgaaccaggacatctgttctcttgaccaccagcttagtccatccctttgaagagagtgacctacagtctgggtctcagccagggtctcaggaaaccaggttcccaccttggctcacggaggtggttaggggcatcagctttagcaccagagttcagatcttgcctcgtcctatataagctttgtcacctccccatcattaaaaggagccatcctccccctccacctcagcagagccctggtaaacagcaaatggactaacgtgcatctagagggttgaggatgaagcctggcctggcatgggcactcaataaatgctaggggccaggcacggtggctgacacctgtaatcgcagcactttgggaggctgaggcaggtggatcgcttgagcccaggagtctgagaccaacctggacaacatagtgagattctgtctctacaaaaagtacaaaattagcctggtgtggtggcgtgcacctgcagtcccatctacttaggaggctgaggtgagaggatggattcagcccaggatgtcagggctgcagtgagtcgtgattgagccgctgcaccccaccctgggtgacagagcaagaccctgtatcaaaataaataaataaatgctaggaaagggatcctactaatggacctttttcctccaaaacagtggctttcatttggtggagatgctacttattagaagcacttgaggccaggtgtggtggctcatgcctgtagtcccagcactttgggacttctgccaaggcagaagaattgcttgaacccaggcgtttcagaccagcctgggcaacatagcaagacctcatctctagaaaacattgaaaaattagccagcatagtggcacatgactgttgtcctaactacttaggcgaaggcaggaggattacttgagctcaggagttcaaggctgcagtgagctgcgatcacatcactgccctccagcctgagcaacaacacaagacccggactctaaaaatcaaaaaagaagcacttagggaaatttcttaaaattaaatgataccctgagcaaacccctagatgttctgattcatttggtttggtgaggtgggagggaatcactgaatctgtaatttattattatttttttttttttgagatggattctcactctgttgcccaggctggagtgcagtggtgcaatcttggctcactgcaacctctgcttcccgggttcaagcaattgtcctgcctcagcctcccgactagttgggattacaggcgcccaccatcacgcccggctaatttttgtatttttagcagagacggggattcaccacgtcagccaggttggtctccaactcctgacctcaggtgatccgcctgcctcggcctcccaaagtgctgggattataggcatgagccaccgtacctagcctgcagttattttattctgagttgatcttctgctggtgaagtgagtcttccactggggcctggagctgcatctccctcaccctgccaatcctgcaagagccagcactgagcttcccctctgctttctcttttttttttttttttttttttttgagatgggatcttactctgttgcccagcctgttcttgaactcgtggcctcaagcagttctccctccttggcctcccaaagtgctggaattataggcatgagccaccacgcctggtctcccctttcagttttaaatgaagccacaagttccctgtataacatttgggagatagaggggagctctctagcctaggggttgaggtctgtgaccaaacgcctataaagttgtctttgtttggactcccccagaagcagagcctgagacaaggattgagtgcaaggaatttatctgggatgcagggcagtaagggagagaggaagtgacacagggacagaaaggcaaccaggaaagagtgtattattaagccagttcctgctgtgaacaaatggggctcagtttcagtggatacctccaggaggcaacagagagcacataccacagagtcatcccacctcacagggagggaattggagtatttatcctccagtgcccatcagacataatcacaggccactcccaggggagctattaattccctaacacttgtgcagccacagagagaccctgggcaaagtagtgtacctcaggtgtgtagttgagctatgggcagggccccagcaacacctgccaaaatgccaaaagtgccagtgggacctgaattcctttttatttatttatttatttatttatttatttttatttatttatttttgacggagtctcgctctgtggcccaggctggagtgcagtggtgcaatctctgctcactgcaagctctgcctcccaggttcacgccattctcctgcctcagcctccggagtagctgggactacaggcgcgcaccaccacgcctgcctgatttttgtgtgcgtgtatttttagtagagatggggattcaccatgttatccaggatggtcttgatctcctgacctcgtgatccgcccacatcggcctcccaaagtgctgggattgcaggcgtgagccaccgcgcccggccccctgaattccttttttaggcagttgtgaaacaacaacatcccatctgttgggcacctactgtatattccatgctcagcgacgcacattcattgtctgattgctgtgttaccactgccttccagagaagggcgcagaggccccaggcacttcgcctaggagggaagcacagctctaaggtcaggctccttctctgtaaggtagaggggctacttcagggtcacactgaccgccccaacccctgacctggcctctgcttctgcgaagatgctgagaaggccctgtgttttgtgttttgggtcccactgaccccagaggggagggccatctctttgacccagactcttggatccaaactggggtgccacccatcaccatgtcagtacccggttgaggggagtcagagatagcaggagaccttgtgggacttgaggctgtgactgttctccaaacaatgtggagtatttccatattttaacaaaagagaggccaggcgtggtggctcacgcctgtaatcccagcactttgggaggccgaggcggatggatcacaacgtcaggagatcaagatcatcctggctaacatggtgaaaccccgtctctactaaaaaatacaaaaaattagccaggcgtggtggtgggcgcctgtagtcccagctactcaggagactgaagcaggagaatggtgtgaacccgggaggcagagcttgtagtgagccgagaacgtgccactgcactccagcctgggcgacagagtgagactctgtctcaaaaaaaaaaaacaaacagagaggttatgcttgtgtttccccttgagccagcacccagcccaggaatgcagcagtcaggatagatcaagtgaagctgcagtaacaaacagcccccacatctcagtgacttaaattgatgggaagggttttttacattcagcagggaagctgtttgcctcatagttacccagggacccaggctcacagagtagctgccattcaaaatgttactggtcgccaagcccagggttgagaggctagagagtccaacactgaccagaaagtgaccacactgcttccacacacagcacatcactgcacctagacacacatggccccatctaaacacaaggggaccaggaagtgcgtgtgcctgaaaggccccaaagccccgtccagtgcctgttctgcaccctgttactgtccgcctccagatcaggaaatggaggcccagagaggttaagccacttgcccatagccacacagctgtggtagcagagctgggatttgaacccagagtctcctttctttgcgagtatgctgccaacctagtggggacctgaacacagactgtgggctctctgaggcctgggttcaaatcctggctttacatctctgtgctgctagcctcaggcagatgagtggcttggttacctcctagaaaatgggtatacctgggagtggtggctcacgcctataatcccaacactttggaaggccaaagtgagcagatcacttgaggtcagaagttcgagaccagcctgaccaacatggtgaaaccccgtctctactaaaaatacaaaaattagctgggtgtggtggcatgcacctgtggtcctacctacttgggaggctgaggcaggagaatcgcttgaacccaggaggcagaggttacagtgagccgagatcgtgccactgcactccagcctggatgactgagcgagactccatctcaaaaaaaaaaaaaaaaaagagaaagaaagaaaaagaaaatgggtgataacccttccctccaggatcttcatgaggagctcagtgatgtcatttataaagcccctggggtctcgggagccctcaaaaatgctggagagacaggccacagctctgaagagcagccccagccctgtggagctgaagcagggtctggaggccccctctggggccaggccaatcatgggaaggcccccaggagttcccagggagggagactcagcacagatgatgtcgaacagcctttaccgcagcccttcgaacaaccataactgtcccgggcactccgctgatgggcaactgtgcctctaacatgcacccggccagcctagggggccgggaaccaagccctctgttggcatctctgtcttgtgggtccccattctagaattatttccgcgatgcctggaacatcttcgactttgtgactgttctgggcagcatcaccgatatcctcgtgactgagtttggggtaagtctccctccagcttctctctgggtgactctgggctggacgaggcaggcggcagggggcgggggagcggtcccagaggcagtgtgtcccggaagccatagctgcttgagccagcacttggccatgaccagagagggagaactggggccccggggacaagggcagcccctcaggagggcattgtggggagatgggggtaaccaaagcttggctgtagggccagcactgaggggtgggctttcctgcatcctggcctaggaattaataatgcagatgagtacactgagggaactgagacactcaaaagctctgaaagctgagccggctcccaaacaccaccctatgtcaggagcccagaaagaatgggtttcaagtcaattctgtttgaaccaaccctctcctagttagtgggcaggagagagccacagccctcaggccagtgtggggacaccactcccagggccatagaggggtccccagggtgtcttccctcctctagccccgggcctgggagactctcaacatgggagtctctggacctctctgtggtggccccacaggccacattgcccttctccttttctggaagactcagggccccagaggtcctgtcctagaccctctccttggccatctgccaatgagcccaggcttggggtccctcaggagattggggggagggtagaagatccttgcagggggaagcaatggtcaaaaaagggtgtcaaagccaagggtcaagggtgataccaatgtcatcttactaacaataaaaataacaatagctcacgagaatcgcagccttgctgtgtgccagggaactgtgccaagtggtttacgtggattggctcagggtagaggtcttggtctcagctcgtaagagaattccctcggagggttcaactgaaggcacccaaatgcagacctcactggtggaggggaagggaagggtacccacaagggtggcaaggtgtccagcgaccacccaccgtggggagctgtcacctgcccaggtgctgaagtggggagggaacctgagccggaggccaggagaagccaccaagtgggagctgtcctgtcaatgtggagagacagagaccagggcccaagcaggcagagagcaataggggagaaacaccccaacctttctctcccctcatcccttatctcctgccagagcctcccatggcccaaagtaaaccggaagcaagctgaatatgatgctcagagcaggcagggaagtcaggagaatagatctgggtgtggtcgggcctgaggaagagggtgttgcctcatttcacagatgggaaaactgacctcagctgggcacggtggctcatgcctgtaatcccagcactttgggaggccgaagccggcggatcacctgaggccaggagttcaagaccagcctggccaacatggtgaaaccccatctctactgacaatacaaaaaaattagccaggtgtggtggtgcatgcctgtaatcccagctactcgggaggctgaggcaggaaaattgcttgaacccggaaggcggaggttgcagtgagcgacggtcataccattgcactccagcctgggtgacaagagcgaaaactccatctcaaaaaaaaaaagaaagaaagaaaactgatcttcaatgcctggggaagtgagagacactcccaaggtcacaaagccaggcctgggtgactcctgagagtacactgacagctcctggggtgtcccagtcagatccccctacagaaaaggatctgtttgcctgctcttccgtcctagaaggccaggaggggctggggaactacacaaaagagggggccattctttgatatgtcctacggcacccgcacccaagtgatacacacttatttgccttcagctccagtgagccagaattttccccttcccctcaccctatccctgaaaccttcctctagagggttcttgcccacatgggggctctctccactggggtgcccccacctggtcattctcccctgtcctgagtttctagagagggctggagctccagctggcaatcaaaatatcttgccatccggctacatacaagacagccttgaaccaatgtccctttgggtcaagaggttagaaggatggtccagctccccagaagggcaggtggggtggaggaagttagctgaaaccttcaatcaccagtaagagagctgtagggacagactccaacagcctgttctcctggctggcaggaagatggggcatggggtgttcatgggacatcaggacccttgcagtagccaaacagcccccagccctccctaccagctgtttgatcttggacaacttgcgctatctcttctcatgtagagtggggctaaccattgcaaccaacctcagacacttgcaagactcacagtgatgcatgcactcaaaagacattcattgagcacctactgtgtgcctggtgtgattataagtgctggagacagaacgagaaggaggggtgccaaacaaaacagaccaagaatacagagtgtctgctcccatagagctgacattctaaggagagagacgggaactttttacaagtaaaagcatcaacaggccgggcatggtggctcacgcctgtaatctcagcactttgggagaccaaggcaggtggatcacttgaggtcaggagttcgagaccagcctggccaacatggtgaaactctgtccctactaaaaatacaaaaattagccgggcacggtggcaggtgcctgtaatcccagctactcaggaggctgaggcaagagaatcacttgattctcaggaggcgagaggttgtagtaagccaagattgtgccactgccctccagcctgggcgacagagtgaaactctgtctcaaaaagaaaaggaagaaaaagaaagaaagaaacgtgaagtgcttggcacagaacctgccaggaaaccaggagtttgaaaatggtggttgttaactattactgctgttgttattgttattgtgaatgggtgtgtagttttgttagccagccctgagttacagtcaatttgagggaaagatagggggtgggtgtttgggtccttctgggacaattaactcccaacctggagtagggagaggcatgtcctggcaggcaaggaggtctcagttgcccctttctgcctcccaggtaagcccactagttctgaggccagggcttggccaggctgagacaggaaatgccagatgcttgggcgggcaggtccctggggtttagggggcagagggcatgcggcagtactaaccagtgctgtctcagctgctgcccccaagtggctggggtgatgtgggtttgccctgtgtgcaatggataatgactgtgtttcttgtcttgtctcttttcatgcctgctcttaaaactgtatattggcgcaacgccgtctgaaaaactcatccaatcaaaatgcactatgaaattcatttgttcatccatgacatggtctgtgtgttcatacaccaatgacttatctcccaacccaccgccaccaccacccccactccccgcccgggaaccgaaacccattggttttttggcactggttacaaatcaacctaaaaaatgctgaacacgcctccccaactgcccccgcccgcccgctccccctcatcttcaacatctgcatctagaatccggttggtcttacttctttctgaagtctaaatgccttacattaactgtgaacgcatctcctcgcgtcggcattgcatgccacaccctgcctctccaacgtgggatgcctgacgctctcctcaaccctccgctctcctctgtctgtctgtcctcccgcccccagcccctgtgcctcccacttcctgtagactctgtctctctgtttttatcgggttctgaatgggggttttctgtttggggtggtttgcgtcttttgcagagaaagggatgggttttcccagcgcagcacctctctcttgccccatcccgcacacacatcccctacactcagagacaatagaggcaaatccactcccagccacctctcaccactcctgtcccccattcagctccatggaccccaggccccaggaaagctgccaactgtctcctcgcccctccagctctctccatcctgctgtccccaatcctccatctcaagcccacaagatctttggccttgaccagcagagacttgactctccaagtctgataaaggagacctgaaggccaggcagtgtgccggcaaagactctcaggcagaggaactcagaagtgccagacttggatctggtagcttcatgtggggctggcccactgaggccctctcctggagccttgaactgtacgtgcacacgcagtcacacagtcactgcacacagacactgcacacacagtcactgtgcacacactcagtcactgcgcacacactgtgcacacagtcactgcacacagacgctgcacgcagtcactgcagtcactgcacacagtcactatgcacacacagtcactgcacacagacactgcacacacagtcactatccacacacacagtcactgcgcagacactgcacacacactgcacacacacaatcactgcgcacacacagtcactgcacgcagaaactggacacacagtcactatgcacacactgcacacaccactatgcacacacactgtgcacagtcactatgtacacacactggcactgcatgtagtcactatggacacacactgcacagtcactgtgcacacatacactgcacacactgtcactatgcaaacacagtcactgcacacagtcactatgcacacacactgcacacacagtcactgcacacagagccactatgcatgcacacacagtctgcattcacacattgaacacacagtcgctatacacacacagtcactgcacacacagtctatgcacccacacactgaacacacagtcactgcatgtacagacactgcacatagtcatgacctcttctctttttctcactcattctccaattctctctctctctcgctcttttttttttttttttttagacagagtctcgctctgtcacccaggctggcgtgcagtggcacaatgtcagctaactgcaacctctgcctccccgtttcaagcaattatgatgcctcagcctcctgagtacctgggattacaagcatgtaccaccacgccaggccacttcttgtatttttagtagagacagggtttcaccatgttggccaggctggtctcgaactcctgacctcaagtgatgcacccgcctcagcctcccaaagtgttgggattacaggtgtgagccactacacctggcctctaatcctcattcactgttcctgtctctgtgtctctcacatacagtcatgcatgcatgcacgcatgcacacacacacacactggccctctctgctacatctacccaccctgtacccccactccagtacatactgcacacatctctctccctcccccacttctcagccccttgcacaccccttgttctgttaaatctcaactgcctctgcccctctcctacccaccaatgaggcccttagagggacgccccaatggcatctttgccctggaatcatcccttccctgctggcaatacacatgcattcacccaccaaacatttaatgagcccctatttggtgccacagatggaattatgggcagaagcagacaccattactgtcccctcttaccacatacagtcaggtgggggaggcaggcatcggtcaaataaccccttgactccacttaaaattatacctgcactgcgagctgaaggatgagcagcattaacaaggcagagagagatgcacagagcattccaggcccaggacagcacatgcaaaggccctgtggtgggacggaacctgtgaggggtcaggatctgcaagcgagggaatgtggctgatgcaaagacagccgagaaaggctggcctggagacagccgaagaaggcagaaggggacaggacccggggctggggagggcggggctatattgtggaatatgggctttctcctaagcaccaggaagggcctgggaggataggaagcaggggaggcgcgactggtcatgtgactagacaagctcgctctggttgcagggcagggaacagcttgacaggaggctgggctggaggtgggcaccaggaatcgcagcaagagatgacagtggaggagagagaacagtgggagggttgtcctctgcaggacccagggaaagatcaggtctgaactgagatgaggtgcctgggagcagtcgggtctggcttaaaactgggagataggctgagcacggtgactcaagcctctaatcccagcactttgggaggctgaggcaggaagatcacctgaggtcaggagttcgagaccagcctgaccaacatggtgaaaccccatctctcctaaaaaatacaaaaattagccaggcgtggtggcaggtgcctgtaatcccagatcctcaggaggccgagacaggagaatcacttaaacctgggaggtggaggttgcagtgagccgaggtcgtgccattgcactccagcctgggcaacagagtgagactctcttaaaaaaaaaatactgggtgatagaggtgagcgagtgcaaggaaaggaccaggttgggggaagagaataggtgtgggcatagcaagtttgaggtgcctttaggacatcccgaaataagtcagataggcaggtgttgtgggggctgcagcttggagctgaggtctacaagtagtaggacttttctggagcccttaggtgggtggtctccatatccttctgagcacttgaggaacatctgagcacagcactggaaaagaaaagaccacaaggacgctgtcctcatgtcttccaggggctgtgtcccacccccatcacattctagccaggaagttcaggggaggtgttgaagagaggaagctgcacctcccaagccatggattgaaatgtggaaggcaggaagagggaacttgtcagaagttctgggggcagtggaaagaattggtactgatgcaggaagagatggagggtggatgagggcagactagtacccttcccccactgccccaaacccttcccgtctccacccctacctgcctcatgtgtctcctcccccacttggctccaagaagggaagcatgttttctgcacgcatctccctgccagatccctggcttttttgcatggttgcaagcttcccctgctctcctccaaacccccctcctgaggctgcttccagggtccgcctgccttcgcatgcctggccgagtccacatgttatgatccgccccatgaaagggatggcttgtactctggggttgaacgggagggggctggggatacctgagccatcggccccatccccaggtggagctgggtggccaggcagggatgggggtcagggcagcagggcacagagagtgactctgttagccaagctgggtttggggcttgttcgaggcactggagacattctcacagcacttgagcccagtgtggtcagggtaggatcccccagcccccttccccatcctagaggcctaaggacgcactgatgtgtcccagagagcatcctagacattgccatcaaacccagaggcctcagaaattccttgaactccagtccttgcctctcagctcccaggccaaagccagcacaagacacagatctggcagccagaaagccctctggaagccaccaagtaggatgcccatgtcacccaaactaggacacttttgaaacaggagggaggctgtgactgtatggtcaccctgtgccatttggggggtgaaggttagaccaagttaaatcttgctacgtggcctgtagcaaatcctacaaatcccatagaacaagtctgattaagccccttcccttagtgtggagagaccctctactcctcctgccttcaccctgctgggtactggccagcgaaggagggtttccatgtctgcctgaggctggggtctcaaactcaaatgcctctgggggccaggcagacaccagtcaaccaggaaagcaagtgccatttctaaaacgtgaggaccctggaaaactggagatcatgtggcctgcttccagggagcaatcgcagcaggcctggggttgccagaaagccagattggtgggcaaaatctcttgatttttaaacaatggcaataatttttaattaaaaacaaggacaaatgaaaaaacactgctcgggcccaacaaaacagttttattagctagatttggcccactcgtgacttcgagagtcccaccccccccaccaaggtcccttgaagccccacaatggccacttaactctagctggtctcctccctgactctccaactctctggccccctggttcttctagcttgggtgggaggaggcagaggcagtgactagacagggggtttttgagcagaggcagtggccacccagggaggtcctgggggcagggatggccccacctcccggcccccagcacccgccccttggtgggcccgggctgatttctgagctcacccacccatgggagctgagtgcttcctgcttcctgcaggcctggtcccgtgctactccacccagccccagaagctgagaagccatccctgagaggggggaaaagggccccaaatgcatcttctccgactcagcgggcagcgaggactcaccctgcagccgaacagtcccagctccctcccgtcctccccattcccgctcgccaagggggtaagaaaagatgctcttccgcttctcccaattggctcgagccgctgctcctcttggccgtggggtgaggtcagggcgggcaggagcgggtgggcagctcggcagggcagggcagggcagggtgcccggtgagtcccgtgacagatgcatttctggcccggagcgtaacatgccctcggaacccgcacatgtccaccaggcctgactgtgctggcgacctccacccccacccccgccctggtgtttgtgcatcgtacacgtatgatagattccgcaacttgaccggcttgtgtcctttcgtctcagtgcatttggttgttgggagaaacaaaaaccatctcgatttttttcctgattggatgattcggatatattttctttttcttgttcttttgttatttcttccccatccccgttcctttttcctcctttctttttcttttcttttccccattgtgggtggggctggcagggagggcttatgcttttgagttgatgccttttcctccctcccaccctctctctcccaacattattcctttttcgagtttttcctctgcatcattgcattaatagtgctttctctctccctccttatttggggtctggcttgcttttttcctgttggttggcttcatgtaggggcctctgtgagtggtgacagctctgagccttttggggtgggtggatggtcacccctcttcctccatctccccagaataacttcatcaacctgagctttctccgcctcttccgagctgcccggctcatcaaacttctccgtcagggttacaccatccgcattcttctctggacctttgtgcagtccttcaaggtgagtcctcgtccctgctgctggcccagggctgagaagacaggtgaccctcatgctctggctgaatgtagaagtcagattggaagtgcctctgtgatgtagtcgtgcagagaatctgttatctccaaggctgttgtcaaacttcctgtccctggtgtgtcttcagagctgtaagggcctcatcctagagcccccagagatgcccaccagccctggaaggactctggcacgtggcatatggccacccaacccagtggggcagagcactgggacaagggaggaagacagtgcggctgagggacccccagcactcttcttcattgccttttttcccaccaggccctgccttatgtctgtctgctgatcgccatgctcttcttcatctatgccatcattgggatgcaggtgagtgtcgtgtccctaaggttcccagagcctcccaaggagggcagccacccttagaaaggggtgggtcagaggagcctggttcacagaagcagccatggaggttgagctgggtttcccagaagccactggaggaatggcagcccctggtcgtcaccctccaattccacaggtgtttggtaacattggcatcgacgtggaggacgaggacagtgatgaagatgagttccaaatcactgagcacaataacttccggaccttcttccaggccctcatgcttctcttccggtgagaaggggacctgctctgataattctgtttccgtggggtggggtgcctgccttcatccttctgttcccatagaggatgtaccctcctcttccaatgcaagacgtgccctcctccttctcttctggcaggggcgcgccctcacccttcttttccggtagggggcgtgcccttctcttccggtaggggacgtgccggccttctcttccgatagggggcgtgccctcctcctccttttctggtgtgggggtggccagatgtgctcttatccttcttttcccgtgaggctggaaatgggtgtcgtggggggcccaggaatcctagcagggcagaagcagagggccctgggacatagtcatcaaggtcattttccaggcattatctctgaatcttcctgaccaccctgtgaggaagggattcttggcagccctatccgacaaataagaaaacaggcttacagaccgtgaggcttgattctttggttcatcatcttggctgcacacaaaagttccttcactcgttcagtgtaggttttttgggggggctttttttttttttttttttttttttggagatggagtctcgctctgttccccaggctggagtacagtggcgcgatctcggctcactgcaagctccgcctcccgggttcacgccattctcctgcctcagcctcccgagtagctgggactacaggcgcccgccaccacgcccagataatttttttgtatttttagtagagtcggggtttcaccatgttagccaggatggtctcgatctcctgacctcgtgatccgcccgcctcggcctcccaaagtgctgggattacaggcgtgagccaccgtgcccagcccttttttttttttttttttagatggagtctctctctgttgcccaggctggagtgcagtggcgccatctcggctcactgcaagctcctcttgtggaggtgtattgagcacctacagcatgccaggcagggctgaaaaacgaggatgcaccaggaaatagagaaaagagacattttaagcactttggaagctaacatccccatggggaagacgaataatcaggaaacaaattatagaggatgctggaaaaagataaaattcaagaataaaggggaatagggccaggtgcagtgactcgtgcctgtaatcctagcattttgggaggccgaggtgggaggatcgctttagcccaggagtttgagaccagcctgggcaacatagtgagaccccgtctctacaaaaaaattgtttttaattaactgggcatagtgccacacacctgtagtcccagctacttgggaggctgaggcaggaggattgctcgagcccaggagttccaggctacagtaagctatgattgtgccactgcactccagcctcggcaacagagcgagactctgtctctaaaaagaaaaatatatttttttaatttttaaaaaaagttacagaggtagatagtggtgatagttgcataataatgtgagcttacttaatgctactgaattgtacacttcaaaatggttaaattgataaacttcatgctgtgtgtattttgccacagtaaaaaataataatgtttttaatctaacaacaaaaaaagaatagagggccggcaggttatgcctctctgaaagtgtgacatttgagagaaattggcaagggagggagtcagtgggtatatggggaagggcaggccaagccgaggggactgcctgtgtaaaggccctgaggcaggagtatggctggcatgtttgaggactgtgaggagcccagcatacctagaacagagtgatctagggagaatatagtatgagatgactgtcaccttcatggaggggagcttttttttttttttaatctgagacagagtttcggtcttgttgcccaggctggagtgcagtggtgcgatctcggctcggcgcaacttctgcctcccaggttcaagcagttctcctgcctcagcctcccgagtagctgagattataggtgcccgtcaccacgcccagctaatttttgtatttttagtagagacggggttttgccatgttggtcaggccgttctcaaactcctgacctcaggtgatccacccgcctcagccacccaaagtgctgggattacaggcatgagccactgcacccggcctgaagggagcttttttttttttttgcttttttttgagacagaatctccctctttgtcacccaggctggagtgcagtggcgcgatctcagctcactgcaacctccgcctcctgggttcaagcgattttcctgcctcagcctcccaagtagctgagactacaggtgagcgccaccacaccgagcaaatttttggtatttttagtagagatagggtttcaccatgttagccaggatggtctcaatctcctgacctcgtgatccacccacctcagcctcccaaagtgctgggattacaggtgtgagccaccgcgcccagccaagaggggagcttttaaagcataacagtgaccagcctgagcaatgcagtgaaaccccatctctacaaaaaaaaatagtttaaaaattagccaggagtggtggcgtgtgcctgtagtccccagctactcaggaggccgaggcgggaggatcacctgagcctgggaagttgaggctgcagtgagcagtgattgtgccactacactccaacctgggtaacagagcaagaccctgtcaaaaaaaaaaaagagagagagagagaaaagaaaggaaaagaaagagagagagaaggaaaagaaaagaaaaaaacatatcagtgtcctcaaatcccaccctagaccaactgaatccaagtctgctggggtggggcacgggcattggtattttttcaaagctctctgtggacttcagtgcacagccaagaatgtgaattcccttctctcagctcccagtaaaaggaggtggtccacctggggcttgcctggccagctccagagcccaagtgctcaacgtgtgtgctccacctcctggggaggcgttggtacccagtcagggctgggtgtccgagtctctgatttctccctgtcctcaggagtgccaccggggaagcttggcacaacatcatgctttcctgcctcagcgggaaaccgtgtgataagaactctggcatcctgactcgagagtgtggcaatgaatttgcttatttttactttgtttccttcatcttcctctgctcgtttctggtgagtctgtggacactgtgagggccgtctgggctccctaagcctggcttcctttcaggggagtgggtttctgtggaatgtggctgtgtcgaaggcttgttccctccaaggcttctctgaaccagcctgggatcaggtgaccctgagcgtctcaaactcagcactgttgacatttgggggtggctgattctttggggtggggccatcatgtgcactgcagtgtatggcagcatccctgtcctccccccaccagatgctggcagcacacgccacccgttcctcctgttgtgacaaccaaaaatgtctccggacattgccaggtgcccccagggggtgggggtggggttgggagtgggggccagaattcccccatttgagactcaatgaaatatttcagctgggcgtagtggccgatgcctgtaatcccaacacttcgggaggctgaggtgggagggtcacttgagcccaggaatacaagaccagcctggacagcatggtgtgaaacccatctctttaaaaaaaaaaaaaaaaattgaattagctgcacacgtggtgctgtgcacctgcagtcccagctactcaggaggctgaggtgggaggatcacttgagccttggaggtcgaggctgcagtgagccatgatcacaccactgcaccccagccagggcgacagaatgagatcctgtctcaaaaacaaacaaaaacaaacaaaaaaaaaaaaaacattgcgagggaagaaatacctcactttggccttgttgggggcagatgtgggaggatttggggtcacagtggttctcttggtgttggtccctgtttcagaagcctcccctccctctcactgactctgtttctttccatcattcttggtctttgtctctctctctcttttttttttttctttgaaatggagtctcactctgttgcccaggctaaagtgcagtggcgagacctcagctcactgcagcctccacctcccaggttcaaccgattcttcagcttcaacctcccaagtagctgggattacaggtgcacatgccaccacacccagctaatttttgtatttttagtagagacagtgtttcaccatgttgaccaggctggtctcaaactcctgacctcaagtgatctgtccacctcggcctcccaaagtgctgggattacaggcgtgatccaccgtgcccggccagtctttgtctctttgtatctctctctctccatctctctctgtttctctcttcctcttccccatctctccacttgatctctctctcactggacctccttgtgtgagtgagcatcacctctccattccccagtctctttctgtctctgtctcatttcctttccccatcttctctctatccctctctccatctgggcctctgtgtacatgtctttgggtctgtctgtccgtctgtctgtctgtatccttctcactcactcattcattccctcggtctctgcccccattctctcttggtccccggggtccccacagatgctgaatctctttgtcgccgtcatcatggacaactttgagtacctcacccgagactcctccatcctgggcccccaccacctggatgagtacgtgcgtgtctgggccgagtatgaccccgcagcttggtaagaagtcaccccgaatcctccagccacaatactcacctctccctggaactggaacacgggctaggtcaggccccagactctggagcactgaactcctggggtcctagcaggggtctcacaggttcagtcaggagagaagatataagaatcatcacccttgcataccccagattaaacacgtagggtgccaaccctgcccaaaccctggactttctgggaaatgagggagggcgtcaaccatgagatgtcctgaagagccctctcctcctacgagtctctcctgtctctcactgtgaagtctccagatggtgaggatgcattagccaggctccagggagaaaaccaacagcatcccagcctcagttctcttgagagtgtggggaggagggctggcctacccttggcagacaggattggcagcaacatcagagtagcagaactcagctcccactgggacccgtgaacctgggagtgagaggacatacaggccaggggaggacgcagagcctcaggggcccatgcatctttgtggccacaaagggagtgggcgctcccatctgggtagacaccagaggggtccctctccactgacgggcaatggtttcagagggtgggttccaccttgtgcacgtgtattgagtgcccacccaacaccaagccttgaaggacactcagaggctttatctgaatacctggaacccaccagccactaactgaggatttagttcaggctggtcttggggcctgaagaagcattactggggggccctcagcagcctaagccccatcttcctctggcctcagcaccagagaggaggccgtcacgaggaaggtgggcaggaggtggtcttggctattcccatagcctcaaacaagtactccatgagaccgagaggctggggagagccgtgggtctggggctgggctttggctggttcctaactcttcctcttttgattttaggtcacagcaattggatgctgtccccaaggcctctattccacaagcccccccccacccctgtagcccatgtagactgtggaggaggcagatgcagagagagccccaggggaggtgccctgcagtcccgaactcgactgacatcctacacccctgggtctccccagtgtctgggaatgtactggggaccttcacttgtccccagtctctcccactccttcaagccagggacaccccagcctcgggcatcatgacctcgctgtgtgcccagggagcccgtgtgaacccattgcctgcactaaccccctttcttctcctttcagcggtcggattcattataaggatatgtacagtttattacgagtaatatctccccctctcggcttaggcaagaaatgtcctcatagggttgcttgcaaggtttgacttccactaaaacctgctagcatccatggaatgagtgtggcttggggttcttcaatatatatatttcatatatatatatatatatatctctctctctctctaaaaaaacagagccatctctctttcttgcattaaactagaaaactctcttagccaacagaatgcagtcatgtagactcgataaagcatggaacatatttcctccttcccttcagccttcagccatctttgcttgctcttagctgaagctgcccatcctggggtctccacggcaccccaaatcagatacatcccctgggggattgtaactttgcatttctcccccaaccatcacctccactctctccccctccacccctcacctcccaaagcccctagccctcctcccctccctggcactggcccctgctccccacctaggccccctcagagaccagcctcagccaaaccagagaacgtgacccaactgtagaaataacagtgatggccgggcgcagtggctcatgcctgtaatcccagcactttgggaggccaaagcaggaggatcgcttgagcccaggagtttgagaccagcctgggcaacatagcaagaacccccttctctataaaaaattagccaggcattgtggcgcatgcctgtagtcccagctacttgggaggctgaggcagaaggattgcttgagcccaggaggtggaggctgcagtgagctatgatcacaccactgcactccaacccaggcgacagagagagaccctgtctctttaaaaaaaaaaaaaaaaaaaaaaaaaggcaatgaacaaaagcatggctctacgtcttccaaagtgagaattctccctcccctccgcatccctccagaactgtagctcagagcccacgctgaatctgacttttctcttttctctctctctccctgctcccgagcagtgaagtaatctttttttactgaccttttcttccattttttttcctcctcttttccattgatttgaaatatctattttatcattctctgcatctttctctctctattttttcggctcgtgtggatttcttttttctttcttctgtttctccccacctctcttcctttggttctctgttcccattcccgttttgtttttttgtttttgtttttgtttttttcattttcggtgctgccaggggccgcatgccttacctggacatgtatcagatgctgagacacatgtctccgcccctgggtctggggaagaagtgtccggccagagtggcttacaaggtagactacccttgccgaccaccgacgtccaggcactgggtttttttttcttcttcttcttctttttttttagtgctgaccagaaacacccggccgactctctttttccaacgtttctcttcttttttgtttttgattcttttttttcttttctcgagtcaactgatcatgaccatcccttgattctaagcagcacactgtgtccgtcctttctgatgagtgtcttcgtgttttgagactccattatggccgacatgccggggggagggggaggggagcgcccaggtccccttgcacctggtctcccaggtaccaaattggaaacaaacacgcttcttcagggagtcaaaacccatgcttcccacttctgcccacccagagcggcccccatgcccaggctggggcaggcgccttgcagagaggggctttagcccccgaaagcaggcgaggtcccgggtccccgcccctgccacgcacacctgaagctgatctctgacctagggccttggggattcgagaccttccaaggagcaccaagaacctctcttcccctcccttccttcccctggagtttcgtccccagcccccgtccctaatccccccaagacaccccaacatgcctctccattgttccagagtgggcaggcggccgcagctggacccctggacggtggcacactgatgcaggccatgcacgctgccttggcggggcctggggcgggcaggcaccatggccgacggggggtggtgcatgctggctgagagagcgagcgtcctgccgccaagcggctggcccgggccacccctccagatccctgtcctggaatctcccttggtgcccaaggacagatgctctgttccctccattcatccacaagaagttcagggatgacctttaaagattctccccacccaaaaagtattaccccatcatcctattctcccatccaccttgatcttccctgcgtccctatccatcaatgctatttgtacctgccccgtgttgccacctcattcctttccttcctctgtgcacccctcctcacctaacctatatgtctcccctccttctcaatcaaagccggggacaaggttgtcccaccagcatctcagacaatgagcctctcctggcacctgtcgctctgtgcccctccctgccgcccccccccccccccccggttttcctcaagtcgcttctctcagtctctgcttagatgaatgtgtgcgcatgtgcaagagagggagggcgagcccttcctctcctggtctttgtgcaggaccaccatgggtccataagacaactttgtgcaaatttgaaaaaggcaccctttccacagaacatgcctgttggaaaattgttgcaatctaccaatgtggtgagaacaagacactttttttctatcacctgggaagctgttatatttaatatacaaatcgggggctgggcgtggtggctcatgcctgtaatcctagtgctttgggaggctgagacgggaggatcacttgagcccagttcgagactagcctgggcaacatagcgagaccccatctctacaaaaagaaaaaatattttaattaataaataagtacataaatctatcatttccaagatgggagccctttgtgcggtgtacaacctgcacaactgtgcacagtggcccagtctatgtgtgtttctctatttcccacctccttccccaccctacccccagtgtcccctccagtgtcctgctctggatttaccatacccctccccatcttcaactctgtgtttcctgcccacttgtgtctgaatccccacccaagttgccctcaccccccttctctgtgccacttcagcctgggctggtgcacaccagcccagcatcctctcccatgccaccaagcatggtggacagagcccctgcctgggacatggggaatcttttcttccctgggctggaagggagtgcccctcaccccttccccctgccattgcacagagagccaagatctggacatgcccctgagatacacttcccacggagctatgaatgagtctcgagattccgtctgcatgcgcccctgtctgtgctgttctgtgtcacagcctcgctgcatgcctgcgaggggcctgccccgtcagtggggggctgcctgcctgctgcttctcagaggaatgatgtggtctgtgcccatctgctctgtcctggtctgggccaagccagggattgggtgtggggagccagtggcaccccccaccagcggctgtggtcctggccccctcagccttggctgttgcatgcactgctcaaatccagcttgtgctctttttctttggggtcagactgaaacggggccatccagaagaactctggggcagggcgggggtggggcaagggttgaggcaaaccctggaaatgccagctctcaggtcaagcaggtgggggaaaaaaggagagggcaggggaccagaagtacaagagagccttttgtgccctccctgcgggccaccaagagaaactgagtactgggacaggtaacctaagtaagagacacctcagccgccacagctttcagagttcttcctgggactccctgggtaggggcgggcgcggctcacgggagacccaggagggatgcctgggaatgactgcgcttgccttgggttttctgtagcggcttctgcggatggacctgcccgtcgcagatgacaacaccgtccacttcaattccaccctcatggctctgatccgcacagccctggacatcaagattgccaagggtaaggaagggacaggggcgggcacagacaggcgtgacagggtggaaccggggatctccctccctaccccaaactagaggatctgctgtcaccacccggatcttcattcactcttccattcattcgttccacagggttttttggggtttggggttttggtgtttttttttttttttttttgagacagagtcttgctctgttgcccaggcagcagtgcggtgacatgatcgcaagtcactgcagccttgacctcccaggctcaagtgatccttccacctcagcctccccagtagctgggactacaggcacacaccaccatactcggctaatttttttttttttggtgtgacaatttccctctgtcacccaggctgaagtgcagtggtgtgatcttggctcattgctacctccgcctcccgggttcaagcgattctcctgcctcagcctcccaagtagctgggattataggtacccaccagcacacccggctaattttttatattttgggtagagatggggtttcaccatgttggccaggctggtctcgaactcctgacctctggtctcaaactcctgacctcaagtgatccacctgcctcgacctctcaaagtgctggattacaggcgtgagccaccatgcccaacctaattttttatattttttatagagatggggtttcatcaggttgcccaggctggtctcaaactcctgggctcaagcagtcctcccaccttggtctcccaaaatgctggtattacaggcatgagccaccacacccggcccatttggcagatatttagtgcactccttcaatgtgccagagacccgtccaagcaggggaggacccagcagcttacactttagatggatggggaggccgccactgaggaggtaaggcagtgtctcatggatccctggggggaaggtgctccaggcagaaggactggcaaaggccctgacagaggggtgaacacaggacacccggggcattgagctgactcaccttctgagtgagggcacgccacgcaggttcagagcagaggaggaacctgacccaactcacatttgaacaggttccctccggccactgaggggatgggagaccgaaaggaggccagtgtgggggctgctgatatcatctgggtggagacagggcggcagcttagatctaggggtaggctcgacgtggtggctcacgcctgtaatctcagcactttgggaggccaaggtgggtggattacttgaggtcaggatgaccagcctggccaatgtggtgaaacccccgtctctactaaaaatacaaaatttagccagacgtggtggtgggtactgtagtcccagctactagggaggatgaggcagaagaatcgcttgaacctgggaggcggaggttgcagtgagccgagatcacgccactgcactacagcctgggtgacagagcaagactctgtctcaaaaattaaattaaattaaattaactggacatggtggcatatgcctgtggtcccagctactcaggaggcagagatgagagtattgcttgaagccaggagtttgaggctgcagtgagtcatgatcgcaccactgcactccagcctgggcgacagaacgagatcctagctcaaaacaacagaaagaaaaagaaaaaaacattttttttaaagctgagaaggggctgggcgcagtggcttacgcctgtaatcccagcactttgggaggccaaggtgggtggatcacgaggtcaggagttcaagaccagcctggccaacatggtgaaaccccatctctaccaaaaatacaaaaagtagccgggtgtcatggtgggcgcctgtaaccccagctactccggaggctgaggcaggagaatcacttgaacctgggagacagaggttgcagtgagccaagatcgcgccactgaactccagcctggatgacagagcaagacgctgtctcaaaaaaaaaaaaagctgaggccgggcacgctggctcacgcctgtaatagcagcactttgggaggccgaggcgggcagatcatgaggtcaagaaatcgagaccatcctgggtaacacggtgaaaccccttctctactaaaaatacaaaaaattagctgggtgtggtggcacgcacctgtagtccctgctactcagaaggctgaggcaggagaattgcttgaacccgagaggcagaggttgcagcgagccgagcttgtgccactgcactccagcctgggtgacagagtgagacttcatctgaaaaaaaaaaaaaaaaaaagccgagaaggctggacatggtggctcacacctgtaatctcagcattttgttgaggccaggcacagtggttcacgcctgtaatctgagcacgctgggaggccgaggtgggtggatcatttgaggtcaggagttcgagatcagcctggccaacgtggcaaaaccctgtctctactaaaaatacaaaaattagccgggtgtcgtggcgtgtgcctgtaatcccagcactttgggaggctgaagcgggtggatcacttgaggtcaggagttcaagaccagcctggtcaacatggcaaaaccctgtctctactaaaaatacaaaaattagccaggtgtggtggcgggtacctgtaatcccagttactagggaggctgaggcagaagaatcacttgaacccgggaggcagagattgcagtgagccgagatcacatcactgcactttagcctgggcgacagagcaagactccatctcaaaaataaaaataaaaataaaaaataccgagaaattcccccaaagacctagctcagggctcactctccatcattagggggaaagaagaagaggaggccagggaggcgggcagagaccagggcagtgtgggctcctggaggcagcttctatgtttaaaagggcggcttcaggaggaaggggaccaaccgtgtcaggcactgcccagagaccaaggatgacaaggatcacaagtgactggtcatcatggtcactttgaccagtgcagctttggcggaggggtcaggggtcccctgtctggagtgcatttcggaggcccgaaaggggatgtgatgtgatttggcagctgattaaggacagcagggcagagagacaggcgcacaattgccagaagaaacggggacctgaggctcacgcctgtaatcccagcactttgggaggctgaggaaggtggatcacttgaggccaggaatttgagaccagcctggccaacatggcgaaaccccatctccactaaaaatacaaaaattagccaggcatggtggtgcacacctataatcccaacaacttgggaagctgagcacaagaattacttgaacctgggaggcagaggttgcagtgagccgagatcaaaccattgcactccagcctgggggacacagcaagactctgtctcaaaaaaaaaaaaaaaaagaaagaaagaaagaaaagaaaaaacaaatgggaccagaaaaaaggagtgggtgggagaggagcaggtggatagtcccacacatgggaaggtgctgagcccagctgaaaccactagtaagtcaggaggagggaagactgagcctcgagacatatgtgccttccagggtcttgagggaaagaagggaggaagagccaaggccacgtggcaagactcaaggaggaagtggcagggaaggtgggggactggaggggtggaggacagatattgttaatgccaggaacaaagtgaaggtaaagagagcacaaggaagttgggagcagtggctcacacctgtaatcccagcactttgggaagccaaggcaggaggatcacttgaggccaggagttcaagatcagcctggccaacacagagagaccccatctctacagaaaattttaaaattagccaggtgtggtgatgtgcacctgtagtcccaactacttgggaggctggagtgggaggatcactggggactgggatgtcaaggctgcagtgagctatatgatgaccacagacatagcagcttaagacacacctatttgtcagctcacagtcctgtaggtcagaagtccaaaaagctggactgggctgtctgctgagggtctcacgaggctgaaatcaaggtgtcagccaagctgggctcctctctggaggatctgggggagaatctacttccaggttcattcaggtgttggcagaattgaagtccttgtggctgtaggactgaggtcttgttttatcactggctttttagctttttgctcctggaagtgcatgtaatcctccatgtgctctcattctctctgacttccccatctgccacccagcagagacaatactgtgcttttcaagggctcacctgattggggcaggcctaccctgatcatctctgtattttgaggtcagctgacttgatattttttttttttcttgagacagaatttcactcttgttgccaaggctggagtataatagtgtgatctcagttcactgcaatctccgcctcccaggttcaagcaattctcctgcctcagcctcctgagtagctgagattacaggtgcccaccaccacgcccagctaaatttttttgtatttttagtagagatggggtttcacaaggttggccaggctggttttgaactcctgacctcaggtgatccacccgcctcagcctcccaaagtgctgggattacaggagtgagccaccatgcccagcattttctttctttttttttttttttttgaaacggagtcttgttctgtcacccaggctggagtgcagtggcgcaatctcggctcactgcaacctccatctcccgggttcaagtgattctgcctcagcctcccaagtaggtgggactacagatgcgtgccaccacgcccggataattttttgtatttttagtagaaacggggtttcaccatgatagcaggatggtctcgatctcccaacctcgtgatctgcccacctcggcctcccaaagtgctgggattacaggcgtgagccaccgcaccgggcctccggtattttaattatatctgcaaagtcccttcatagcctgggcaatggtccctagattagtgtttgaataaacagaatcttggcagaagggcagcttttgaattctgcctaccacagttccttcgtttgtacaacgggtctaacaacacccccactctttgtatgtaatgccatcgtaactcagcttctgtggcactctgagaatctgtgttcaggggtcccaaaaccacccacaggttcagtgattccctggaagaactcagaactgagaaaagtttttatactcacagtttattacagtgaaagaatatagattaaaatctgcaaagggccgggcacggtggctcacgcctgtaatcccagcactttgggagggcgaggtaggcagatcacttgaggtcacgagttcaagaccagcctgaccaacatggtgaaaccctgtctctactaaaaatacaaaaattagccaggcgtggtggctggcgccagtaatcccagctacttggaaggctaaggtaggagaatcacttgagcccaggaggcagaggttgcagtgagccgagatcccgccacttcactccaggctggacagagtgagactctattagaaaaaaaaaaaaaaaaaaaatctgcaaagggcctggcatggtggcttacgcctgtaatcctggcactttgggagggcaaggcgggcagatcacttgaggtcacaagtttgagaccagcctggccaacatggcgaaaccccgtctctaccaaaaatacaaaaattaggcatggtgccagacccctgtaatcccaactactcaggaggctgaggcaggagaatcgcttgaccctgggaggcagaggttgcagtgagctgagactgtgccattgcactccagcctgtgtgacaagatcaaaactctgtccaaaaagaaaattagccaggtgtggtggcatacacctgtagtcccagctactccagaggctgaggcacaagaatcctttcaacccaggagatagagctacattaagccaagatcacgccactgcactccagcctgggcaacagagcaagactctgtctcaaacaaacaaacaaattccaaaaacataaaatgcgcaaaggaagggcatctggggaagggtccaggagacaccaggtgcgagcttccagttgtctgcctccagtggagttgcacagacaacgcttaattctccctgcagtgtgtgacaacacgcaccgtgtactgccaaccagggaagctcacctgagccttggtgccccagggtttttattgagggtttgtcatataggcagggctgacgtagttactcagtctccagtccctccagaggtcaaactgataccacgtggcccaagaccccaacgataaatcgcattgttagaatgaactgtatggaaaattatccaggcgtggcggcgggcggctgtaatcccagctactggggaagctgaggcaggagaatcacttgaaactaggaggccgaggttgcagtgagccaagatcgcaccattgcactccagcctgggcaatagagcaaaaacaccatctcaaaataaataaataaatagaatgaactgtattggccgggtacagtgactcatgcctataatcccagcactttgggaggctgaggctggaggatcgtttgaggccaggagttcgagaccagcctaggcaacatagtgagaccctatctcttttttttaaaaaaaaaaaaaaaaaaaaaaaagaatgaactatacagtgtggcccaaggccccctgctaaataaagacactcttcaggcaggacatttcaaaggcttagagatcacctcccaggagcaagtcaatgggccagtcctttcatcggaatgtgcagggtttggacaacactagcctactgagctagtccttactgcttagcaccccagcttctatgacacctactggattcccttcctgagggtttcaaagactcctggagatgtctctgaatttggctgtcacagttgttacttgtaccccagatgccactcagttccctgaagacaatgatcccccagatttctcagccaggagcccctccacctcttgtcctcagtgggtgccaggcctcatcctggagttccacagctgagccaggctctcggggttacggaaggtcaagagggtgtggggacaacaatggaagagtgataacagtggcagccctttgagcagatgcgggtctcaggagaacataacgcgctttcttttcatagttcagctcactttctaagcacactgagcttcctttccagcaggctaaggggctgcaaagggggtacagattaacctcattcttcagattctcaaaaatggtgtcaccattcattgctggagactgggagaaagggggcaagtccatctcattctctctgtctctgtctctctctctctcttccctgtccatctgtttctctctcccacccacccctctgttctctctgcccagaagaatctctattttggttttggttttgtttgttttgtattgttttgagacggagtctcgttctgtcgcccaggctggagtgcagtggcgcagtctcaactcaccactgcagcctccacctcccaggttcaagcgattctcatgcctcagcctcccgagtagttgggattacaggcgcacgccaccacgcccagctaatttttgcatttttactagagactggtttcaccatgttgaccaggctggaccctatcctctttcaagccccccaccccaggcattgagggcagagccaactacctgcctgaaccaattagcatattaaacgtaaacccagttagcatatccaaatagcagcccacagtgacattctgactgtcagaatgtggattgcttgagcccaggagctcaaggcttcggtgaacaaagattgtgccacagcctgggcaacagagtaagtccctgtcgatcgatagatagatgatagatagatagatagatagatagatagatagatagatagatagatagataaatttttaaaaaaaataataggccaggcacagtggctcatgcctgtaatcccagcactttgggaggccgaggcaggcagatcacctgaggtcaggagttcgagaccagcctggccaacatggtgaaaccctgtctctacaaaaatataaaaatagccaggcagatgtctgtaatcccagctactcaggaggctgaggtaggagaatcgcttgaactctgaaggtggaggttgcagtgagccgagatcatgccattgcactccagcctgagtgacagagcgagactccatctcaaaaataataacaataataaaaataataataaatgctctggccccaaagtggcacattacatggtgcacaccccattagcaaggactcatcacatggccctgccaaccacaggaggaacccccccatgtactcaggtaggagggccaggaaacaccgtcagagagctttaatgactcaccccatgactggggtgagggacgagggactggctgcaggccaagggcatgtccgtggcagtggagacttgggaaaggggaaaagacctcctctgagccacgcacagtggctttcatctgtaattccagcactttgggaggctgaggtgggaggatcttgagcccaggaggtcgagactgcagtgagctatgtttgtgccacggcactctagcctgggcgacagagcaaaaccctgtctcaaaaatcaaaataaaaccaaaaccaaaacttcctctgttggggatgctccagggcgtcccagccttgaacagatgggtcactgcagtaataatcctatggcagacactgtcccaaggctgcacgcacgttactttgatcatcaaacaaccaggtgatagccaggcatggtggtgcgtgcctgtagtcccagctactcaggaagctgaagcgggagaatctcttgaacctgggaggcggaggtaacagtgagtcgagatcacatgactgcacttcagcctgggaacagagagagactctgtcaaaaaaaaaaaaaaaacaggccagacgcggtggctcacgcatgtaatcgccagcactttgggaggctgaggagggtggatcacctgaggtcaggagtttgagaccagcctggccaacatggtgaaaccccgtctctactaaaaatacaaaattagttgggcgtggtggtgcacacctgtaatcccagctactcgggaggctgaggcaggagaatcgcttgaacccaggaggcagaggttgcagtgagctgagattgcaccattgcactccagcctgggcaacaagagtgaaactccatctcaaaaaaaaaacaaaaaaaaaacaaccagccaggcgcggtggcttacgcctgtaatcccagcactttgggaggccgaggcgtgtggatcacccgaggttaggagttcgagaccagcttgaccaacatggtgaaactccgtctctactaaaaatacaaaaaattagccaggcatggtggtgcatgtctgtaatcccagctactcgggaagctgagacaggagaattgcttgaacccaggagtcggaggttgcagtgagccaagctcgtgccactgcactccagcctgggcaacagagcaagactctgtctaaaaaaaaaaaaaaaacacacacacacacacacaacaaccaggtgaggcaagtactcttgctatcatctccatttcacagatggagaaactgagttactaagtggtagagtaacctaagtcatgcagccgataactgggagacaagattgggacccaggtcgcccagctgttctccatgccgggctgtctcctgcacagctgctccatggtcctggccccaccgaaaaccagagcccacaaggtcattccagcagcactgcccagggcctcctctgggccaggccgttggggaactggagaccccatggggaccagaaagattggggtctcgttctcgggagcctatggctttgcagctgacccagagtccagctgacacccaggcaggcagtcagggtctgtctacacccccattgcaggaggagccgacaaacagcagatggacgctgagctgcggaaggagatgatggcgatttggcccaatctgtcccagaagacgctagacctgctggtcacacctcacaagtgtaagagctgagcccagccctgggatccaatccaccaggacagatggagggggagggaaaggggaggcctggggagagtgttggcctgggctggtatacacagggacccaggacaagggccccaaagaggcctgcccttggtgagctcaccgtgtgtgtgcccccagccacggacctcaccgtggggaagatctacgcagccatgatgatcatggagtactaccggcagagcaaggccaagaagctgcaggccatgcgcgaggagcaggtgcgctgttcgccgctctggggacatctgggctggggacagtggcttgcatgtcaccacgggaaccaactggaatatgagggtggctgagccccagggcaggtccctgaaaagtaggggctgtgcacagcagctcacacctgcaatctcagtgctttgagaggccagggcagagggatcgtttgagaccaggatgagaccaccctgggcaacacagtgagactccatctctacaaaataaaacattagccaggcatggtggtgcacacctgtagtcccagctatttaggaggccaagatgggaggatcacttgaggccaggagtgggagaccagtctgggcaacatagaaagacccatatctctacaaaaaaaaaataaaattagctgcatgtggcgccatgcacctgtggtcccagctacttgggaggctgaggcaggagaatcacttgaacctgggaggtggaggttgcagcaagccaagatcaagccactgcactccagcccgggtgataagagcaggactctatctcaaaaaaaaaaaaaaaaaaaaaaaaaaaagttcttgccaaggacacatcatgtggattcattcttcattcagctgctccaccaacacttattgagtattactgtgtgcagggcgctgttctcagtcctcggggatgcacccatggggaaaataggccagaatccctgccctcagggagcagacattccaagtggggaaatgccaatggtagcaaatgactgaatcgtgcaacatccagcaaagagaaagaaagtgtcgtgggggaaagtggagaagaatccagaagataggagtatccaggggaggaggggatgcggtgggaaatgggtagttggggagcctccctgagaaagtgacatgtgagcaaaggcttgaaggaaaaggggagagggagtgagctaagcaatacctggaagggtgttccaggcagaggaaacagccagtgcaaaggctctgaggctggaccgtgcctgggttgtttgggtaacagcaaagaggccagtgtggtggaaaagagcagggaggagacaagggcaaggaggtgacagggcagatccttcagggccatgggagctgcaggaaggactctggctttttccccaagcaagtgggagccatggagggttctaagcaaaggagggataggacctgactcaagtgctcatgggcgccctctggtggctcttgtggaacagtggggttgaaggtaggagcgggagacctgggagaaggtgcctgcagtgagagatgaggacgtgggaccaggctggggctatgacttgggtggaggagtgagaagtggtccagttctgcgtggaattggaagggtctagatggatgagacctgagagagtgtgtgtgtgtgtgtgtgtgtatactggggatgtcgcaatgccttctgggtaccaccgtcccaccaccccacccttgtccacacactgctctctgccccattccccaggaccggacacccctcatgttccagcgcatggagcccccgtccccaacgcaggaagggggacctggccagaacgccctcccctccacccagctggacccaggaggagccctgtgagtgtcacccctgccagggaggtggagtgtgggggtgccgtggtccccacgttctggaagctgcccaagcgcccactgctaccccggcctctgtcccccatgcaggatggctcacgaaagcggcctcaaggagagcccgtcctgggtgacccagcgtgcccaggagatgttccagaagacgggcacatggagtccggaacaaggcccccctaccgacatgcccaacagccagcctaactctcaggtgcctctgtcccccaactccccaatggctcccagggcccgggtggttcaggtggaagggatctgggccccccacacacacacacctgcagctccctccctctgcagacaccagggatctggaggtcaggccccagagctcatctggctttgccatctgctccgcagtccgtggagatgcgagagatgggcagagatggctactccgacagcgagcactacctccccatggaaggccagggccgggctgcctccatgccccgcctccctgcagagaaccaggtgagggctttcaccactgccctggggctggacccctcactctgcactgggtagggccaggcccccccacaagcagcccagtgcatcccctccctgccggactcaggcctgggtagggactccttcagtctctgaagcagtctgcaggccccacccaccacctggtcacacctggagcacctgcagaccctcctccctcacagaggacagagaggaaagtgctccccctggggcagagggcagtggccactgcaaaatggtctctggctgccctggttggaggctgcagacaggggaggttgtggaagatttgtgggtgcagcagggttcaacagggccagctgagacctgccacgaagatcacccctacacaaacacacacacacatgctcaacatacatgcacacacatgtgcagctgtgcgcctactcagatgcttgcatacacacacgtgtgtgcacgtgggcatatacacactgcacatgtactcacacatgcacacatgtacgtgcacacgtgtctgcatatgggaacttggcaggtcctaggatacagtagcagagtctggggtgggtctgggggcagctgggctcgtattttctgtctggtctctgtgggagtcattggggggcacaggggtgtgtgcttgatgtgtgtctgtgtgtggccgcttcacccagctgccaggcccacctgcaggtgatcccgttgccttggactcatgggacagagggcccagaggcatagctggctgcccacccggcctgaacagcgggggcccatgcacgcagcccgcctctggaggagaacagggcatggctgtgagagcctggcccgggtgcgtggcatgtgtggctgtggcgagctttccgtgtgccgtgtgtggcgtctgcacggggcaggaggctgtgctgtgcctggctggaccagggtcacctgagggcctggcctctggctgctgggaacgtgggttggggagcacccagcgtgcatgctgctgctccctcaggaccgagctgctgggccccaggagagggttgggacaagcccagctgacggccaccacatggaagctttgagcatcggccggagccaggggttggggtgtgcatcgcatgaggcagagcccagggccaggggctcgaggctgcgccgtcctgtctttcggtcccatgcctctgccatttgtctgtctgcatctcctgtctgtctcctctgtacccatgggaatagaggacgcccagccccgggggcctgggacacccacccgccaggactttaacttttcttttcctccctgccttctccctccgatttctcttgatgccagtgccactcccctccttggcttcttctccatgcaccacctcctcactctccctcttgccttttatatttattttcttctttctgttttttctgtgtgcaccatcccatggggctgtgacagaggagaaggggccggccacgtgggaataacctcagtgtatgtaccgcgcctgcccagcgcccagcagggctccggccccctcttcctccccaccccccctccagggagtcccgtcatctctcaccgtccccggaccccaccctttctttggcaatcgcaccctctcccctccatggagcccaatccttgtgtgtggtgtcctgtgtgtgcccctcacccataagccctggtgggcggggccatccccatcctcacccctacccccttttcttcagggccccccacgccggaggacactggctctccaagagcctggcccactctgcacctctttctggggggcttcttctcctgacaccaccaccaacccctggtcctgcagctcctacctggagcagggccaccagcgctcagctgggctggaccctgggaggcgggcgtctgccccatctccctccttccctcctctgcctgctgcagagaaacctgtgtgtcagggcttgacccagggatgaagcaccagggaaaagagtgggcccccagagcctccagtgcctgggtatcccccacccccacccagagctccctagcttgggcctcaccagaaggactcagacttgtgggggcagcgagcacagccccgttagccgggaggacccaaagctgccatgccgggcacctggtcctgagcccataggtcagccagccacagtcggaggcttctcaccctcccaggagagcaagctggggcagggatgagtgcggcagtccagggctcccaggtttgcaccctggatgtggagagggcttccctctggccagcctgagcctgcccaactgtggctgggcccccaggactggagagtgaggatcagatctttctggtcagaacccaggatgggctcaaaaggagcagtcctgtctctgagggacagaggaatcctcaggctccaccctcagaggcctggccacacccagagccctgattgatcagggggagccaaggccccatggcatcccctggcccctgccccaggatggtcacaccgcagtcaccgaaggccaccaccaggctgccacaatggggcaggaaggaccgggaccacttggtgctagctgctgaccccagcccaccggcctgtcccctcccccagaccatctcagacaccagccccatgaagcgttcagcctccgtgctgggccccaaggcccgacgcctggacgattactcgctggagcgggtcccgcccgaggagaaccagcggcaccaccagcggcgccgcgaccgcagccaccgcgcctctgagcgctccctgggccgctacaccgatgtggacacaggtgggcagccctgtggtgctcagggacaagcagaacagaggagaggagaggggaggagaaggcagggcggaggagacactaaggaagaagaaagggagaggcctccatggagaggggacagagggggccaggcagcagctgcaggaacctgggtactaccccctccccccaacccactgacctgcctcggttcaggggatctctagggcccccacaccttccaggtggcctcctgtgtgtgcatctgccccacctctccctcacgaccacctgtgtgtctgtctgaccctcacccggcccaggcttggggacagacctgagcatgaccacccaatccggggacctgccgtcgaaggagcgggaccaggagcggggccggcccaaggatcggaagcatcgacagcaccaccaccaccaccaccaccaccaccatcccccgccccccgacaaggaccgctatgcccaggaacggccggaccacggccgggcacgggctcgggaccagcgctggtcccgctcgcccagcgagggccgagagcacatggcgcaccggcaggtgggtgcggctgcaagtgaccccaggctgggctcggccgggaggcggggaggagagaaggggataccccatccaacagccactctaggcaaaggtccccggatcccggctgtgaccacctcccatcctgcccccaagccaccggggtgcccggcggccggagcggacacggatccccaccacaccagctgcctatgctgtccccccagcccccttgcccacccgccgccccctccccgccgcccgcagctgcttgctcctcggttgtggatcatatttgagttctgggccgtgccgcccgacctttcactttcctttaacccggcttctgtttttgtttcaattatgatttctgtcctctggacgcctgtgagtaatttttgaaacttctgctatttttaaccccgaaacttacaaaactccatttctcatttctcttttcactttgttgtgttggttttcgactcctcccctccctgtctcactccccctcctcccctccctcctccctgtggctgttgcttttttccattcaatgtcctgtgtcccccctctcctcctcctcctcctcctccccctccccctcctccctctcctcccggcccctctcccttcgctcccctctcttcctcccaatcccgtgtctcctttgattttgttgtatctttttttttgatttcctttgtttcaattttcgtgtagggcagtagttccgtaagtggaagcccagccccctcaacatctggtaccagcactccgcggcggggccgccgccagctcccccagaccccctccaccccccggccacacgtgtcctattcccctgtgatccgtaaggccggcggctcggggcccccgcagcagcagcagcagcagcagcagcagcagcagcagcaggcggtggccaggccgggccgggcggccaccagcggccctcggaggtacccaggccccacggccgagcctctggccggagatcggccgcccacggggggccacagcagcggccgctcgcccaggatggagaggcgggtcccaggcccggcccggagcgagtcccccagggcctgtcgacacggcggggcccggtggccggcatctggcccgcacgtgtccgaggggcccccgggtccccggcaccatggctactaccggggctccgactacgacgaggccgatggcccgggcagcgggggcggcgaggaggccatggccggggcctacgacgcgccaccccccgtacgacacgcgtcctcgggcgccaccgggcgctcgcccaggactccccgggcctcgggcccggcctgcgcctcgccttctcggcacggccggcgactccccaacggctactacccggcgcacggactggccaggccccgcgggccgggctccaggaagggcctgcacgaaccctacagcgagagtgacgatgattggtgctaagcccgggcgaggtggcgcccgcccggccccccacgcaccccacgcacacaccccacccgaggagccgcgcagaggccgcgggggcccagcacagagggcccgggagagggccagccgggagaccccagactctggagaggccagggctgggccacaagggtgtcccgcagagaccctcggccaaaagagaccctcctgggcagccacggcgccccccaaccagccccgatccccccacccacgacaggggctctcgggtgggaggcagggagcagacaaaccacacagccaagggatttgaattaactcagccatttttggagaactttggggaacatgaaaaaaaaaaaaaaaaaaaaaaaaaaaaacatttttaaaagaaaaaacggggagaaaaaaatagcttctattgatgagttttatcatctcaattgaatctttcctttccctgatgaagacagctggtggccgagtgcggcaaagaagccagaaggaaccagaatcccagtgccctacacccaccaccagacacactcacacccacacacgttctcagacacacacaagagtgcttgccggttataccaaaccctactattactgcctgcagaaatcaatttaaaaaaataataataacaataaacaattttaaaaaggacaaaaaaattaatgattgagaaaagaggcatttttttctgacatttggtcctgcttgaaacaacaaaagaagaagaaaaacccaccatcaccaccgattcctttgcttcttttttccttttttcctaccttgtttgaaaaccgtgggcttgggactgtgaattattgcatgacattcaaaaagaaaaaaaaaataaaaaaaagttgaatcaaagggcttttggataggagtggtctttgtcccttggctaggtgctgcctgggtgggtctctcttggggaatcatacaaagaggcacttctttgttagctcctagaagcactgtttgaaagcgacaaggaggccgggcatcatgcacgcctgtaatcccagcactttgggaggctaaggcagatggatcacttgaggtcaggagttcgagaccagcccgaccaacatggcaaaacctcatctctactaaaaatacaaaaaaaattagccatgcgtggttgcacaaactgtaatcccagctactccggaggctgaggcatgagaatcacctgagcctgagaggcggaggttagcagtgagccaagatcccaccactgcactccagcctgagtgacggaatgagactcttgtctcaaaataaaaaaaaaaaaggcagggcgcggtggctcacgcctataatcccagcactttgggaggccgaggtgggtggatcacatgaggtcaggagttcacaaccagcctggccaacatagtgaaacgccgtctttactacaaatacaaaaattagccacgcgtggtggtgggtgcctgtaatcccagctactcgggaagctgaggcaggagaattgcttgaacccaggaggcggaggttgcagtgaaccaagatcgtgccactgcactccaacctgggtgacagagcaagactccatcttagataattaataataataatttggtctcgtggacaccaacccccgcccccacgaagtgtttcagccatccccagagtccaatacccctttgagagcttctgttctcacaacagtacctgacccatagcaagctactattgactatcaccattactactgtagcattaaggcaaacattttgaacaggtcttgttccagacaacaggccctgcttgagcttaccttgggtaagaaatctgcagactccagatagcaagacaggtgtaagtccttctaaaataatggtaagccaaatgtggtggcacacacctgtagtcccagctgttcaggaggctgaggcaggaggatcacttgagcccacgaggtcaagaccagctatgatcacacctgtgaataaccattgcattccagcctgggtgacgtagaaagatcccatctctaaaaaaattaaaagtaaaaataaataaataaaataatggcatctaggaaaagatcagtccaacgagaagtcaaagttttgaggtcgagtgcggtgtctgactcttgtaatctcaacactttgggagaatcacttgaggccagtagttcaagaccagcctgggcaacatagcaagacgctgtctctaaaaaaaaaagtttgttttttttaaggctgggtacagaggctcacgcctgtaatcccagcactttgggaggccaaggtgagcagatcaccaagtcaggagtttgagaccagcctggccaacatagtgaaaccctgtctctactaaaaataaaaaaattagccaggtgtggtggtgcatgcctatattcccagatacttggcaggctgaggcaggaaaatcgcttgaacctgggaggcagaggttgcagtgagctgagattgcgtcactgcactgcagcctgggcgacagagtgagactacgtctcaaaaaaaaaaaaaaaaaaaaatggaatggaagggagggagggaggggtttaactttctaaccaggcaatctggcaaccaccacaggcttctaaacaagctgcccatccattgcagagctggcctctggtccccctcccatggtgctggggttgagtgtgtccaggagccactggagtaagccagggtttgtgcaattccctctgctgtcaatgaggctgcagccatctgtcctcccaggaatgaagttcactaccgaagccccccatgagccctgaactcaaaggccaagtctatgcccgagtgccaagaggtagacccaaggcctccacagtgcacatcatcaggctagagtgttagttgcccaggagacacagggtgggaagatcaggggatgaggaagaggggcggagcttggcctagtccccagtctcacatactctcaggccattgcttgagcctcatcacctggaaggttggaagggcatgattgtcatagaaatgccctgaggtgaccgggcgcggtggctcaagcctgtaatcccagcactttgggaggccgaggcgggcagatcatgaggtcaggagatcaagaccatcctggctaacacggtgaaaccccgtctctgctaaaaatacaaaaaatcagccgggcatagtggcaggcgcctgtagtcccagctactcaggaggctgaggcaggagaatggcgtgaacccgggaggcagagcctgcagtgagccgagatcatgccactgcactccagcctgggcaacagagcgagactcaagaaaaaaaagaaaaagaaatgccctgaggtgcaaaagcccaggcattggccgggcgcggtgtctcacgcctgtaaccccagcactttgggaggccaaggtgggtggactgcttgagctcaggagttcgagaccagcctgggcaacatggcaagaccttgtctctactaaaaataaaaaaaagcagagtgtagtggtacatgcctgtggtcccagctactcgagaggctgaggcaggaggatcacttgagcccaggagttcgagaccagcctgggcaacatggtgaaaccccattcctacaaaaaatacaaaaattggccaggcgtggtggctcacgcctgtaatcccagcactttgggaggccgaggtgggcggatcacctgaggtcgggagttcgagaacagcctggccaacatggaaaaaccccatctctactaaaaatgcaaaattagccgggcgtagtggcgcatgcctataatcccagctactcgggaggctgaggcaggagaatcacttgaacctgggaggtggaggttgcagtgagccgagatcatgccattgcgctccagcctgggcaacaaaagcgaaactccgtctcaaaaaataaataaataaataatacaaaagttagcccggcatggcggtgcatgcctgtggtctcagctacttgggaggctgaggtaggaggatcacttgaacccaggaggtcaaggcatcagtgacctatgatcacaccactgcactccagcctgggtgacagagcaaaaccctgttccaaaaaaaaaagagagagagggagacagagagttattttaggaaggtttgtttatgtagactcatcttgggactgactatctgcagtgataggagtcattctgctctccctggtaaggagacggggggatacctccacaaaggaaaatttatgtcacctttttttttgaaacggagtcgcactctgttgcccaggctggagtgcagtggtgcaatcttggctcactgcaagctctgcctc

SEQ ID NO: 113 - RNA, 8641 nt, Homo sapiens
  source 1..8641: mol_type = mRNA
gatgtcccgagctgctatccccggctcggcccgggcagccgccttctgagcccccgacccgaggcgccgagccgccgccgcccgatgggctgggccgtggagcgtctccgcagtcgtagctccagccgccgcgctcccagccccggcagcctcagcatcagcggcggcggcggcggcggcggcgtcttccgcatcgttcgccgcagcgtaacccggagccctttgctctttgcagaatggcccgcttcggagacgagatgccggcccgctacgggggaggaggctccggggcagccgccggggtggtcgtgggcagcggaggcgggcgaggagccgggggcagccggcagggcgggcagcccggggcgcaaaggatgtacaagcagtcaatggcgcagagagcgcggaccatggcactctacaaccccatccccgtccgacagaactgcctcacggttaaccggtctctcttcctcttcagcgaagacaacgtggtgagaaaatacgccaaaaagatcaccgaatggcctccctttgaatatatgattttagccaccatcatagcgaattgcatcgtcctcgcactggagcagcatctgcctgatgatgacaagaccccgatgtctgaacggctggatgacacagaaccatacttcattggaattttttgtttcgaggctggaattaaaatcattgcccttgggtttgccttccacaaaggctcctacttgaggaatggctggaatgtcatggactttgtggtggtgctaacgggcatcttggcgacagttgggacggagtttgacctacggacgctgagggcagttcgagtgctgcggccgctcaagctggtgtctggaatcccaagtttacaagtcgtcctgaagtcgatcatgaaggcgatgatccctttgctgcagatcggcctcctcctattttttgcaatccttatttttgcaatcatagggttagaattttatatgggaaaatttcataccacctgctttgaagaggggacagatgacattcagggtgagtctccggctccatgtgggacagaagagcccgcccgcacctgccccaatgggaccaaatgtcagccctactgggaagggcccaacaacgggatcactcagttcgacaacatcctgtttgcagtgctgactgttttccagtgcataaccatggaagggtggactgatctcctctacaatagcaacgatgcctcagggaacacttggaactggttgtacttcatccccctcatcatcatcggctccttttttatgctgaaccttgtgctgggtgtgctgtcaggggagtttgccaaagaaagggaacgggtggagaaccggcgggcttttctgaagctgaggcggcaacaacagattgaacgtgagctcaatgggtacatggagtggatctcaaaagcagaagaggtgatcctcgccgaggatgaaactgacggggagcagaggcatccctttgatggagctctgcggagaaccaccataaagaaaagcaagacagatttgctcaaccccgaagaggctgaggatcagctggctgatatagcctctgtgggttctcccttcgcccgagccagcattaaaagtgccaagctggagaactcgaccttttttcacaaaaaggagaggaggatgcgtttctacatccgccgcatggtcaaaactcaggccttctactggactgtactcagtttggtagctctcaacacgctgtgtgttgctattgttcactacaaccagcccgagtggctctccgacttcctttactatgcagaattcattttcttaggactctttatgtccgaaatgtttataaaaatgtacgggcttgggacgcggccttacttccactcttccttcaactgctttgactgtggggttatcattgggagcatcttcgaggtcatctgggctgtcataaaacctggcacatcctttggaatcagcgtgttacgagccctcaggttattgcgtattttcaaagtcacaaagtactgggcatctctcagaaacctggtcgtctctctcctcaactccatgaagtccatcatcagcctgttgtttctccttttcctgttcattgtcgtcttcgcccttttgggaatgcaactcttcggcggccagtttaatttcgatgaagggactcctcccaccaacttcgatacttttccagcagcaataatgacggtgtttcagatcctgacgggcgaagactggaacgaggtcatgtacgacgggatcaagtctcaggggggcgtgcagggcggcatggtgttctccatctatttcattgtactgacgctctttgggaactacaccctcctgaatgtgttcttggccatcgctgtggacaatctggccaacgcccaggagctcaccaaggtggaggcggacgagcaagaggaagaagaagcagcgaaccagaaacttgccctacagaaagccaaggaggtggcagaagtgagtcctctgtccgcggccaacatgtctatagctgtgaaagagcaacagaagaatcaaaagccagccaagtccgtgtgggagcagcggaccagtgagatgcgaaagcagaacttgctggccagccgggaggccctgtataacgaaatggacccggacgagcgctggaaggctgcctacacgcggcacctgcggccagacatgaagacgcacttggaccggccgctggtggtggacccgcaggagaaccgcaacaacaacaccaacaagagccgggcggccgagcccaccgtggaccagcgcctcggccagcagcgcgccgaggacttcctcaggaaacaggcccgctaccacgatcgggcccgggaccccagcggctcggcgggcctggacgcacggaggccctgggcgggaagccaggaggccgagctgagccgggagggaccctacggccgcgagtcggaccaccacgcccgggagggcagcctggagcaacccgggttctgggagggcgaggccgagcgaggcaaggccggggacccccaccggaggcacgtgcaccggcaggggggcagcagggagagccgcagcgggtccccgcgcacgggcgcggacggggagcatcgacgtcatcgcgcgcaccgcaggcccggggaggagggtccggaggacaaggcggagcggagggcgcggcaccgcgagggcagccggccggcccggggcggcgagggcgagggcgagggccccgacgggggcgagcgcaggagaaggcaccggcatggcgctccagccacgtacgagggggacgcgcggagggaggacaaggagcggaggcatcggaggaggaaagagaaccagggctccggggtccctgtgtcgggccccaacctgtcaaccacccggccaatccagcaggacctgggccgccaagacccacccctggcagaggatattgacaacatgaagaacaacaagctggccaccgcggagtcggccgctccccacggcagccttggccacgccggcctgccccagagcccagccaagatgggaaacagcaccgaccccggccccatgctggccatccctgccatggccaccaacccccagaacgccgccagccgccggacgcccaacaacccggggaacccatccaatcccggcccccccaagacccccgagaatagccttatcgtcaccaaccccagcggcacccagaccaattcagctaagactgccaggaaacccgaccacaccacagtggacatccccccagcctgcccaccccccctcaaccacaccgtcgtacaagtgaacaaaaacgccaacccagacccactgccaaaaaaagaggaagagaagaaggaggaggaggaagacgaccgtggggaagacggccctaagccaatgcctccctatagctccatgttcatcctgtccacgaccaacccccttcgccgcctgtgccattacatcctgaacctgcgctactttgagatgtgcatcctcatggtcattgccatgagcagcatcgccctggccgccgaggaccctgtgcagcccaacgcacctcggaacaacgtgctgcgatactttgactacgtttttacaggcgtctttacctttgagatggtgatcaagatgattgacctggggctcgtcctgcatcagggtgcctacttccgtgacctctggaatattctcgacttcatagtggtcagtggggccctggtagcctttgccttcactggcaatagcaaaggaaaagacatcaacacgattaaatccctccgagtcctccgggtgctacgacctcttaaaaccatcaagcggctgccaaagctcaaggctgtgtttgactgtgtggtgaactcacttaaaaacgtcttcaacatcctcatcgtctacatgctattcatgttcatcttcgccgtggtggctgtgcagctcttcaaggggaaattcttccactgcactgacgagtccaaagagtttgagaaagattgtcgaggcaaatacctcctctacgagaagaatgaggtgaaggcgcgagaccgggagtggaagaagtatgaattccattacgacaatgtgctgtgggctctgctgaccctcttcaccgtgtccacgggagaaggctggccacaggtcctcaagcattcggtggacgccacctttgagaaccagggccccagccccgggtaccgcatggagatgtccattttctacgtcgtctactttgtggtgttccccttcttctttgtcaatatctttgtggccttgatcatcatcaccttccaggagcaaggggacaagatgatggaggaatacagcctggagaaaaatgagagggcctgcattgatttcgccatcagcgccaagccgctgacccgacacatgccgcagaacaagcagagcttccagtaccgcatgtggcagttcgtggtgtctccgcctttcgagtacacgatcatggccatgatcgccctcaacaccatcgtgcttatgatgaagttctatggggcttctgttgcttatgaaaatgccctgcgggtgttcaacatcgtcttcacctccctcttctctctggaatgtgtgctgaaagtcatggcttttgggattctgaattatttccgcgatgcctggaacatcttcgactttgtgactgttctgggcagcatcaccgatatcctcgtgactgagtttgggaatccgaataacttcatcaacctgagctttctccgcctcttccgagctgcccggctcatcaaacttctccgtcagggttacaccatccgcattcttctctggacctttgtgcagtccttcaaggccctgccttatgtctgtctgctgatcgccatgctcttcttcatctatgccatcattgggatgcaggtgtttggtaacattggcatcgacgtggaggacgaggacagtgatgaagatgagttccaaatcactgagcacaataacttccggaccttcttccaggccctcatgcttctcttccggagtgccaccggggaagcttggcacaacatcatgctttcctgcctcagcgggaaaccgtgtgataagaactctggcatcctgactcgagagtgtggcaatgaatttgcttatttttactttgtttccttcatcttcctctgctcgtttctgatgctgaatctctttgtcgccgtcatcatggacaactttgagtacctcacccgagactcctccatcctgggcccccaccacctggatgagtacgtgcgtgtctgggccgagtatgaccccgcagcttggggccgcatgccttacctggacatgtatcagatgctgagacacatgtctccgcccctgggtctggggaagaagtgtccggccagagtggcttacaagcggcttctgcggatggacctgcccgtcgcagatgacaacaccgtccacttcaattccaccctcatggctctgatccgcacagccctggacatcaagattgccaagggaggagccgacaaacagcagatggacgctgagctgcggaaggagatgatggcgatttggcccaatctgtcccagaagacgctagacctgctggtcacacctcacaagtccacggacctcaccgtggggaagatctacgcagccatgatgatcatggagtactaccggcagagcaaggccaagaagctgcaggccatgcgcgaggagcaggaccggacacccctcatgttccagcgcatggagcccccgtccccaacgcaggaagggggacctggccagaacgccctcccctccacccagctggacccaggaggagccctgatggctcacgaaagcggcctcaaggagagcccgtcctgggtgacccagcgtgcccaggagatgttccagaagacgggcacatggagtccggaacaaggcccccctaccgacatgcccaacagccagcctaactctcagtccgtggagatgcgagagatgggcagagatggctactccgacagcgagcactacctccccatggaaggccagggccgggctgcctccatgccccgcctccctgcagagaaccagaggagaaggggccggccacgtgggaataacctcagtaccatctcagacaccagccccatgaagcgttcagcctccgtgctgggccccaaggcccgacgcctggacgattactcgctggagcgggtcccgcccgaggagaaccagcggcaccaccagcggcgccgcgaccgcagccaccgcgcctctgagcgctccctgggccgctacaccgatgtggacacaggcttggggacagacctgagcatgaccacccaatccggggacctgccgtcgaaggagcgggaccaggagcggggccggcccaaggatcggaagcatcgacagcaccaccaccaccaccaccaccaccaccatcccccgccccccgacaaggaccgctatgcccaggaacggccggaccacggccgggcacgggctcgggaccagcgctggtcccgctcgcccagcgagggccgagagcacatggcgcaccggcagtagttccgtaagtggaagcccagccccctcaacatctggtaccagcactccgcggcggggccgccgccagctcccccagaccccctccaccccccggccacacgtgtcctattcccctgtgatccgtaaggccggcggctcggggcccccgcagcagcagcagcagcagcagcagcagcagcagcagcaggcggtggccaggccgggccgggcggccaccagcggccctcggaggtacccaggccccacggccgagcctctggccggagatcggccgcccacggggggccacagcagcggccgctcgcccaggatggagaggcgggtcccaggcccggcccggagcgagtcccccagggcctgtcgacacggcggggcccggtggccggcatctggcccgcacgtgtccgaggggcccccgggtccccggcaccatggctactaccggggctccgactacgacgaggccgatggcccgggcagcgggggcggcgaggaggccatggccggggcctacgacgcgccaccccccgtacgacacgcgtcctcgggcgccaccgggcgctcgcccaggactccccgggcctcgggcccggcctgcgcctcgccttctcggcacggccggcgactccccaacggctactacccggcgcacggactggccaggccccgcgggccgggctccaggaagggcctgcacgaaccctacagcgagagtgacgatgattggtgctaagcccgggcgaggtggcgcccgcccggccccccacgcaccccacgcacacaccccacccgaggagccgcgcagaggccgcgggggcccagcacagagggcccgggagagggccagccgggagaccccagactctggagaggccagggctgggccacaagggtgtcccgcagagaccctcggccaaaagagaccctcctgggcagccacggcgccccccaaccagccccgatccccccacccacgacaggggctctcgggtgggaggcagggagcagacaaaccacacagccaagggatttgaattaactcagccatttttggagaactttggggaacatgaaaaaaaaaaaaaaaaaaaaaaaaaaaaacatttttaaaagaaaaaacggggagaaaaaaatagcttctattgatgagttttatcatctcaattgaatctttcctttccctgatgaagacagctggtggccgagtgcggcaaagaagccagaaggaaccagaatcccagtgccctacacccaccaccagacacactcacacccacacacgttctcagacacacacaagagtgcttgccggttataccaaaccctactattactgcctgcagaaatcaatttaaaaaaataataataacaataaacaattttaaaaaggacaaaaaaattaatgattgagaaaagaggcatttttttctgacatttggtcctgcttgaaacaacaaaagaagaagaaaaacccaccatcaccaccgattcctttgcttcttttttccttttttcctaccttgtttgaaaaccgtgggcttgggactgtgaattattgcatgacattcaaaaagaaaaaaaaaataaaaaaaagttgaatcaaa

SEQ ID NO: 114 - DNA, 175000 bp, Homo sapiens
  source 1..175000: mol_type = genomic DNA
aacaaatcaccccagcactgtggcttggcagcacacatgtctagtcatagagttatatgtagttacgtgtagagccatatgtatcgtcacacgttctgtgggtcaggaatttggacccagcttaaccagctccacttctcgccagggttcagtcaaataccagctgcctcccacctgagagctcagccggggaagggtccctttccaatctcacgtggtgttggcaggatccagttcctcatggcctgctggactgagaacctcagttctcactgcctgttggccagaggccgcctttatgtcctcgccatgtgggcctctccaacatggcagctgacttcatcagagcatccatgccaagaaggcaacagagagggccagggagactgaagtcatacccttttgcgacctagtcatggggtgacattccatcacctttgcccattggttagaagcaggccaccaggtacagcccaagctcacggggaggggtcatacaagggtgtcaataccaggaggtgaggggtgctggggccatcttatgagtctgcccactgaggtaactaacaaccttgaggcctgacacagtggacaaaggcccttattaacagcagagaactgggaactttatttatttatttatttttgagacagagtctcactcttgtcacccaggctggagtgcaatggcatgatcttggctcactgcaacctccacctcccaggttcaagcaattctgcctcagcctccggaatagctgggactacaggcatgcaccactacacccggctaatttttgtatttttagtagagacagggtttcgccatgttggccaggctggtctcgaactcctgacctctggtgatctgcctgccttggcctcccaaagtgctgggattacaggcgtgagccaccgcacctcgctggaacttaatttttttagagacagtgtcgctctatcacccaagctggagtgcagtggtgcaatcctagctcacttgcagcctcaaattcctgggttcaggtgatcctcccacatcagcctcccaagaactgggaactaacagctgtttctctgctgtccttctcaagaaaagggaggctactgctaccccactggggacaatgctgggtttccctttaggacaggctctgagacaaggcggaggtgctgtttgtggccacagagcaggggactctgggttgcaggtgtggcctggctaaagtaggctttactgggctcctctctgcctgcatcaccccccggctgggcggttgtctctgaggccaaccttactccctgctgggcaggctggacagctgccctctccgtttgcccctctaccacccaaaaggcaggaggctctggagaccaggaccctgcccgccacggcctgtgtcccaggcgtgagggggtgccccacagacctctgctgagctgctgctgaatgacgccccttgggggtcctgccggaaggtcagagcaggggtgcactcccataaagaaacgcccccaggtcgggactcattcctgtgggcggcatcttgtggccatagctgcttctcgctgcactaatcacagtgcctctgtgggcagcaggcgctgaccacccaggcctgccccagaccctctcctcccttccggggcgctgcgctgggaccgatggggggcgccaggcctgtggacaccgccctgcaggggcctctccagctcactgggggtggggtgggggtcacacttggggtcctcaggtcgtgccgaccacgcgcattctctgcgctctgcgcaggagctcgcccaccctctccccgtgcagagagccccgcagctggctccccgcagggctgtccgggtgagtatggctctggccacgggccagtgtggcgggagggcaaaccccaaggccacctcggctcagagtccacggccggctgtcgccccgctccaggcgtcggcgggggatcctttccgcatgggcctgcgcccgcgctcggcgccccctccacggccccgccccgtccatggccccgtccttcatgggcgagcccctccatggccctgcccctccgcgccccacccctccctcgccccacctctcaccttcctgccccgcccccagcctccccacccctcaccggccagtcccctcccctatcccgctccgcccctcagccgccccgcccctcagccggcctgcctaatgtccccgtccccagcatcgccccgccccgcccccgtctcgccccgcccctcaggcggcctccctgctgtgccccgccccggcctcgccacgcccctacctcaccacgccccccgcatcgccacgccccccgcatcgccacgcctcccttaccatgcagtcccgccccgtcccttcctcgtcccgcctcgccgcgacacttcacacacagcttcgcctcaccccattacagtctcaccacgccccgtcccctctccgttgagccccgcgccttcgcccgggtggggcgctgcgctgtcagcggccttgctgtgtgaggcagaacctgcgggggcaggggcgggctggttccctggccagccattggcagagtccgcaggctagggctgtcaatcatgctggccggcgtggccccgcctccgccggcgcggccccgcctccgccggcgcagcgtctgggacgcaaggcgccgtgggggctgccgggacgggtccaagatggacggccgctcaggttctgcttttacctgcggcccagagccccattcattgccccggtgctgagcggcgccgcgagtcggcccgaggcctccggggactgccgtgccgggcgggagaccgccatggcgaccctggaaaagctgatgaaggccttcgagtccctcaagtccttccagcagcagcagcagcagcagcagcagcagcagcagcagcagcagcagcagcagcagcaacagccgccaccgccgccgccgccgccgccgcctcctcagcttcctcagccgccgccgcaggcacagccgctgctgcctcagccgcagccgcccccgccgccgcccccgccgccacccggcccggctgtggctgaggagccgctgcaccgaccgtgagtttgggcccgctgcagctccctgtcccggcgggtcccaggctacggcggggatggcggtaaccctgcagcctgcgggccggcgacacgaacccccggccccgcagagacagagtgacccagcaacccagagcccatgagggacacccgccccctcctggggcgaggccttcccccacttcagccccgctccctcacttgggtcttcccttgtcctctcgcgaggggaggcagagccttgttggggcctgtcctgaattcaccgaggggagtcacggcctcagccctctcgcccttcgcaggatgcgaagagttggggcgagaacttgtttctttttatttgcgagaaaccagggcgggggttcttttaactgcgttgtgaagagaacttggaggagccgagatttgctcagtgccacttccctcttctagtctgagagggaagagggctgggggcgcgggacacttcgagaggaggcggggtttggagctggagagatgtgggggcagtggatgacataatgcttttaggacgcctcggcgggagtggcggggcagggggggggcggggagtgagggcgcgtccaatgggagatttcttttcctagtggcacttaaaacagcctgagatttgaggctcttcctacattgtcaggacatttcatttagttcatgatcacggtggtagtaacacgattttaagcaccacctaagagatctgctcatctaagcctaagttggtctgcaggcgtttgaatgagttgtggttgccaagtaaagtggtgaacttacgtggtgattaatgaaattatcttaaatattaggaagagttgattgaagttttttgcctatgtgtgttgggaataaaaccaacacgttgctgatggggaggttaattgccgagggatgaatgaggtgtacattttaccagtattccagtcaggcttgccagaatacggggggtccgcagactccgtgggcatctcagatgtgccagtgaaagggtttctgtttgcttcattgctgacagcttgttactttttggaagctaggggtttctgttgcttgttcttggggagaatttttgaaacaggaaaagagagaccattaaaacatctagcggaaccccaggactttccctggaagtctgtgtgtcgagtgtacagtaggagttaggaagtactctggtgcagttcaggcctttctcttacctctcagtattctatttccgatctggatgtgtcccagatggcatttggtaagaatatctctgttaagactgattaatttttagtaatatttcttgttctttgtttctgttatgatccttgtctcgtcttcaaagtttaattagaaaatgattcggagagcagtgttagcttatttgttggaataaaatttaggaataaattattctaaaggatggaaaaactttttggatatttggagaaattttaaaacaatttggcttatctcttcagtaagtaatttctcatccagaaatttactgtagtgcttttctaggaggtaggtgtcataaaagttcacacattgcatgtatcttgtgtaaacactaaacagggctcctgatgggaaggaagacctttctgctgggctgcttcagacacttgatcattctaaaaatatgccttctctttcttatgctgatttgacagaacctgcatttgcttatcttcaaaatatgggtatcaagaaatttcctttgctgccttgacaaaggagatagattttgtttcattactttaaggtaatatatgattaccttatttaaaaaatttaatcaggactggcaaggtggcttacacctttaatccgagcactttgggaggcctaggtggacgaatcacctgaggtcaggagtttgagaccagcctggctaacatggtgaaaccctgtctctactaaaaatacaaaaattagctggtcatggtggcacgtgcctgtaatccaagctacctgggaggctgaggcaggaaaatcgcttgaacccgggaggcagagtctgcagtgagttgagatcacgccactgcactccagcctgggtgacagagcgagactctatctcaaaaaaaattttttttaatgtattatttttgcataagtaatacattgacatgatacaaattctgtaattacaaaagggcaataattaaaatatcttccttccacccctttcctctgagtacctaactttgtccccaagaacaagcactatttcagttcctcatgtatcctgccagatataacctgttcatattgtaagatagatttaaaatgctctaaaaacaaaagtagtttagaataatatatatctatatattttttgagatgtagtctcacattgtcacccaggctggagtgcagtgatacaatctcggctcactgcagtctctgcctcccaggttcaaatgcttctcctgcctcagccttctgagtagctgggattacaggcgcccaccaccatgtccagctaatttttgtatttttagtagagatggggtttcaccatgttggccaggctggtcttgaactcctgaccttgtgatctgtccacctcggcctcccaaagtgctgggattacaggtgtgagccaccatgcctggctagaataataacttttaaaggttcttagcatgctctgaaatcaactgcattaggtttatttatagttttatagttattttaaataaaatgcatatttgtcatatttctctgtattttgctgttgagaaaggaggtattcactaattttgagtaacaaacactgctcacaaagtttggattttggcagttctgttcacgtgcttcagccaaaaaatcctcttctcaaagtaagattgatgaaagcaatttagaaagtatctgttctgtttttatggctcttgctctttggtgtggaactgtggtgtcacgccatgcatgggcctcagtttatgagtgtttgtgctctgctcagcatacaggatgcaggagttccttatggggctggctgcaggctcagcaaatctagcatgcttgggagggtcctcacagtaattaggaggcaattaatacttgcttctggcagtttcttattctccttcagattcctatctggtgtttccctgactttattcattcatcagtaaatatttactaaacatgtactatgtgcctggcactgttataggtgcagggctcagcagtgagcagacaaagctctgccctcgtgaagctttcattctaatgaaggacatagacagtaagcaagatagataagtaaaatatacagtacgttaatacgtggaggaacttcaaagcagggaaggggatagggaaatgtcagggttaatcgagtgttaacttatttttatttttaaaaaaattgttaagggctttccagcaaaacccagaaagcctgctagacaaattccaaaagagctgtagcactaagtgttgacatttttattttattttgttttgttttgttttttttgagacagttcttgctctatcagccaggctggagtgcactagtgtgatcttggctcactgcaacctctgcctcttgggttcaagtgattctcatgcctcagcctcctgtttagctgggattatagacatgcactgccatgcctgggtaattttttttttttcccccgagacggagtcttgctctgtcgcccaggctggagtgcagtggcgcgatctcagctcactgcaagctccgcttcccgagttcacgccattctcctgcctcagtctcccaagtagctgggactacaggcgcctgccaccacgtccagctaatttttttgtatttttaatagagacggggtttcaccgtgttagccaggatgatcttgatctcctgacctcgtcatccgccgaccttgtgatccgcccacctcggcctcccaaagtgctgggattacaggcatgagccactgtgcccggccacgcctgggtaatttttgtatttttagtagagatggggttttgccatgatgagcaggctggtctcgaactcccggcctcatgtgatctgcctgccttggcctcccaaagtgctaggattacaggcatgagccaccatacctggccagtgttgatattttaaatacggtgttcagggaaggtccactgagaagacagctttttttttttttttttttggggttggggggcaaggtcttgctctttaacccaggctggaatgcagtatcactatcgtagctcacttcagccttgaactcctgggctcaagtgatcctcccacctcaacctcacaatgtgttgggactataggtgtgagccatcacacctggccagatgatggcttttgagtaaagacctcaagcgagttaagagtctagtgtaagggtgtatgaagtagtggtattccagatggggggaacaggtccaaaatcttcctgtttcaggaatagcaaggatgtcattttagttgggtgaattgagtgagggggacatttgtagtaagaagtaaggtccaagaggtcaagggagtgccatatcagaccaatactacttgccttgtagatggaataaagatattggcatttatgtgagtgagatgggatgtcactggaggattagagcagaggagtagcatgatctgaatttcaatcttaagtgaactctggctgacaacagagtgaaggggaacaccggcaaaagcagaaaccagttaggaagccactgcagtgctcagataagcatggtgggttctgtcagggtaccggctgtcggctgtgggcagtgtgaggaatgactgactggattttgaatgcggaaccaactgcacttgttgaactctgctaagtataacaatttagcagtagcttgcgttatcaggtttgtattcagctgcaagtaacagaaaatcctgctgcaatagcttaaactggtaacaagcaagagcttatcagaagacaaaaataagtctggggaaattcaacaataagttaaggaacccaggctctttcttttttttttttttgaaacggagtttcgctcttgtcacccgggctggagtgcaatgatgtgatctcagctcactaaaacctctacctcctgggttcaagtgattcttctgcctcagcctcccaagtaactgggattacaggcgtataccaccatgcccagctaatttttgtgtttttagtagagatggggtttcaccatgttggccaggctggtctcgaacttctgacctcaggtgatccactcgcctcagcctgccaaagtgctgggattacaggtttgggccactgcacccggtcagaacccaggctctttcttatacttaccttgcaaacccttgttctcattttttccctttgtatttttattgttgaattgtaatagttctttatatattctggatactggattcttatcagatagatgatttgtaaaaactctcccttcctttggattgtctttttactttcttgatagtgtcttttgaagtgtaaaagtttttaattttgatgaagtcgagtttatctattttgtctttggttgctgtgcttcaagtgtcatatctaagaaatcattgtctaatccaaagtcaaaaaggtttactcctatgttttcttctaagaattttagagttttacatttaagtctgatccattttgagttaatttttatatatggttcaggtagaagtccaactttattcttttccatgtggttattcagttgtcccagcactgtttgttgaagagactattctttccccatggaattatcttagtacccttgttgaaaattaatcgtccttaattgtataaatttatttctagactgtcagttctacctgttggtctttatgtcgatcctgtgccagtaccatacagtcttgattactgaagtttgtgtcacagtttaaattcatgaaatgtgagttctccaactttgttccttttcaagattgatttggccatgctgggtcccttgcatttccgtacgaattgtaggatcagcttgtcagtttcaacaaagaagccaagtaggattctgagagggattgtgttgaatctgtagatcaacttggggagtattcgcatcttaacaatattgtcttccacctatgaacatgggcaaactttgtgtaaatggtcagattgtaagtatttcgggctgtgtgggcacagtgtctctgtcacagctacgcggctctgccattgtagcatgaaagtagccataagcaatatgtatgagtgtctgtgttccaatagaattttattaatgacaaggaagtttgaatttcatataattttcacctgtcatgagatagtatttgattattttggtcaaccatttaaaaatgtaaaaacatttcttagcttgtgaactagccaaaaatatgcaggttatagttttcccactcctaggttaaaatatgataggaccacatttggaaagcatttctttttttttttttttttttttttttgagacggagtttcactcttgttgcccaggctggagtgcagtggcgcgatctcggctcactgcaacctctgcctcccaggttcaagacattctcctgcacggcctccctagtagctgggattacaggcatgcgccaccacacccagctaattttgtatttttagtagagacggggtttctccatgttggtcaggctggtcttgaactcctgacctcaggtgatccacccgcctcagcctcccaaagtgctgggattacagggtgtgagccaccacaccctgctggaaagcatttcttttttggctgtttttgttttttttttaaactagttttgaaaattataaaagttacacatatacattataaaaatatcttcaagcagcacagatgaaaaacaaagcccttcttgcaagtctgtcatctttgtctaacttcctaagaacaaaagtgtttcttgtgtcttcttcccagattttaatatgcatatacaagcatttaaatgtgtcattttttgtttgcttgactgagatcacattacatatgtatttttttacttaacaatgtgtcatagatattgttccatagcagtacctgtaattcttattaattgctatgtaatattttagaatttctttttaaaagaggacttttggagatgtaaaggcaaaggtctcacatttttgtggctgtagaatgtgctggtgacatattctctctaccttgagaagtccccatccccatcacctccatttcctgtaaataagtcaaccacttgataaactacctttgaatggatccacactcaaaacatttagtcttattcagacaacaaggaggaaaaataaaataccttataaagcactgtttaatattgtattaaattggatcaatttgggggctagaatgtatgttagagacatgatatgtccataggtccttgctatcacagtgaggtctcagggacagtcgtttggtatcatttgggatctcataagcagactctctctgcttgacctgacaaatcagagtctgtgttttaacaggttcagtgagtgacttacatgcacattggagtttgggaagctccactgtaggtgcttagaccttacctttgttgttgctaataacaatgcaagcatttgggaggaagacctgtgttgctcatatgtgtccaggtgtagctgaggtggccttgcttatctgctgtagggccgttgagcatttctgtagctgtgatgagtgagctgaggtgagcctgcggagagctcccagccattggtagtgggactcgcttagatgaactggaaggaccctttcatctgagcagccactatggagaaaaacaaccgaatgaggggagagacaatgtgcaattttatttagggcacaaaggagagctgtggttagaaggtgacatttgagtggaaagggggcaagccatgtgtatagcgggagaagagaggtccaggcagagttaacagaaggcagaaatgctttccatgtttgagaaccagtaaggaggccagtggctgaagtaaggtgaagggcagaaataaggatgaggctgcgagagatgagaggttagagacgagcgtcttgtgcaccaagataagcttgtgtggtcaaaacaagtagtttaatttatgtttttaaaagatcattttggctgggcacaatggttcatgcctgtaataccagtagtttgagacggtgtggtgggaggattgcctgaggccagacgaccagcatagccaacatagcagcacctataaggtctctacaaaaaactttaaaaaattagctgggcatagtggtgtgtgcctgtagtcccagctactcaggaggctgaggaggctggaggattgcttgagtccaggagtttgaggctgcagtgagctatgattatgccactacactacaacctgggcaagagagtgagaccctgtctctaaatatacacacacacacacacacacacacacacacacacacacacacacacacacacacacatatatatgtatatatatgcatttagatgaaaagatcactttgacaataccacatgctggtgaggatttagaaaaactaggtcacttattgctggtgggaatataatatagtacggccactctggaaaacagtttggcagtttgtcataaaactgaacataccgttagtatacagcccagcagcaactacaatcctgggcattaatcctagagaaatgaaaccttaatgttcacataaaaacctatactcaagtatgcatagcagctttacccataatatctaagaactggaatcagctcagatgtccttcaacaggtgaatggttaaactactcagtaataaaaaggaatgagctactgatagcatgcaacagtttaggtgaagttatgctaatgaaaaaagccaatcccaaaaggttatacatactgtatgattctatgtttttttgcaatggcacagttttagggatggagaatagattagtggttgcctggggttagagatggggtagtagagtaggttagtggtggcagaggagagaaaagagagggaggtgaatgtggttataaaaggacaacacaggggaatacttgtaatggaaatgctttgtctttttttttttttttttttttttggcgacagagtcttgctctgttgcccaggctggagtgcagtggcatgatcttttctcactgcaacctctgcctcctgggttcaagtgatacttgtgtctcagtctcccatgttcagagtgaaacaaaccagaggtaatgttcatccaaataatccaacacacatgacattaaaacatcaagatcaggtcggacgtggtggctcatgcctgtaatcccagcacttttgggaggccaaggtgggcagatcacttgaggtcaggagttcgagaccagccgggccaacatgatgaaaccccatcttgactaaaaatacaaaaattagccgggcatggtggtgtgcacctgtagtcccagctacttgggaggctgaggcaagagaactgcttgaacccgaggggcagaggttgcagtgagctgagagtgcgccattgcacttcagcctgtgtgacagagtaagactccatctccaaaaaaaaaaaaccaagatcaattaaaatacagcattactgggccgggtgtggtggctcacacctgtaatcccagcactttgggaggccgagatgggcagatcacgaggtcaggagatccagaccatcccggctaacacggtgaaaccccgtctctactaaaaaatacaaaaaattagccgggtatagtggtgggtgcctgtagtcccagctacttgggaggctgaagcaggagaatggtgtgaacccgggaggcagagctggcagtgagctgagatcgcgccactgcactccagcctgggcgacagagcaagactccgtctcgggggaaaaaaaaaaataaataaatagaatgctgtagtgtccttgagtttacatgcccctccttacgcttgtgtgcccgtgcagattgcttgattacacaattagaggaggctggcggaggattgttttaatttttttttttttgagacagtctggctctgttccccaggctagagtgcaatggcgcaatcttggtgcactgcaacctctgcctcctgggttcaagcagttcttctgccgcagcctcccgagtagctgggattataggcgcccgccaccacgcccaactattttttgtatttttagtagagcagcgtttcaccatgctggccaggctggtctcgaactcctgacctcagatgatctgctgccccagcctcccaaagtgctgggattacaggcgtgagccacacctggccgtttgttttaattttgaaggtgaagtgaaagtgactacatttaccaaaagtgattgaaaagccaggactgttcttaccctgtttttccagttcttgctcagagcaaggtggtttctttttcacttaatcaccatacttacttttcatgtagaacaagtcagtttgagttatcagttcatcatcttaactaaattccatgggggaaggaattagttttagtttcttaaacttccaggtttgcttattggacaaaatgagatagcaaggcagtgtttttaagttagattttttatttctttggtaatacaattttctcagaaacttagtagtcttttagtttagttgtttttagttggtcctatgttttggatcacccctctctactttattttgatagtgccaactgtgaagacatctgaagccataggtttggatgggaaggaggcatctttagcctgatcatcttcgccaggctgtttatctccttttgcttggctgagaagtcttaataggaggcttattcccagctatttggggacatagaagcagttagccattgcttatattttactgaggtctgtgtggtatgttgattgtagtcagttaacgattttgagaactgaaggcagcctggtatatatagagtaggtattagactgtgtttcttctaattgaatttcccatctcttgtaatctatgccatcatcttctgtactgctgagaaagaaagaaagtttctaatcaaactataccactggttgtaagatgcagtttggctttagtgatgttaacacatgattcaaacgtgaaattgattgagtattggtgaaatacagaggagatttaaagccagaagacctgggtttaaatgctggctgtatgacttcatatctgtgtgatcttgggcatgtcatggttggcacttcaatttcttctctctataatgggggaagtgaggccagtcatggtggctcatacctataatcccagtgctttgggaggccaagatgggaagatcgcttgaggccaggagtttgagcaattgggcaacatcgtgaggccccgtctctacaaaatattttgaaaaaattagccaggcccagtggtgcgtgcctgtggtccgcgccactcaggaggctgagacgggaggatcctttcagcctaggagtttaaggctaaagtgagccatgattgtgctatcgtactccagcctgggcagcagagcaagatcctgactctaaaaaaaagtaaaataaagtaaaatgggggaaatgaactgctttagtaacatcatctgttttttctgtgagcagcgtagcttgacagccattggtgaactcgtgccctgtgcttccctgtccagatccccattctgcccgcaacatggagtataacggtttattcatagtagtcgagaaacactcactgaatgaatgaatgaggtgtagaactaagtggagtgggtaattcaacacatattaatttccttcttttttttatttttagaaagaaagaactttcagctaccaagaaagaccgtgtgaatcattgtctgacaatatgtgaaaacatagtggcacagtctgtcaggtaattgcactttgaactgtctagagaaaataagaactttgtatattttcagtcttaatgggctagaatattctttgtgtcccagctattttaaatggattcagaaatccatttaagatgaagaaggacccttttcccatatttctggctatatacaaggatatccagacactgaaatgaataatgttccctttttgtaatcttttatgcaaaaattaaaaccattatggtaattgaacaacatgtttatgtttagttaacacccttagcaactatagttattttaaaaccatctatggtttgatatttttgcatttgttgcaatagtaggaacagcacaagacagttcagtttgtctctcttatttgctttttcttggcagtttgctgtcctattgtacctctgctcctagcagtggctggagcccactcctctgtgcttcgggattagtggggatcgtggggcattgactgtaggtcagctttccttgcttgatctttctcactgggatgaactagcagcaccttcttttgtagctgctttgcttttgactatctttctgaccgttgttcctagtagctgtagatggtaaatatatttaggcctgtttccaatggctcagtaggagacatattcacctatgatatctgaattctgttacccacatgggcatgcgtgaaatagttgccttgccttactttcccttggaataaataattcatgttattctcctggtagaagctagaaaaagcctttatagtcagtcagaaaaaaatttttagacaaataatcttgattttagtactgacaaaaacgtgtggtgattctttttttaatttttttttgagacggagtttcactcttgttgcccaggctggagtgcaatggcgtgatctcggctcactgcaacctctgcctcctgggttcaagtgattctcctgcctcagcctcccaagtagctggagttacaggcatgtgctactgtgcccagctaattttgtatttttagtagagatgttggtcaggctgatctcgaactcccaaccttaggtgatctgcccgcctcagcctcccaaagtgctgggattacaggcgtgagccagggcgcccggtgattcatttgttttttcaaaaaatttcctcttggccattgcttttcacttttgttttttttttttttttgagacggagtcacgatctgtcacccaggctggagtgcagtggcatgatcttggcttactgcaagctctgcctcccaggttcacgccattctcctgcttcagcctggcgagtagctgggactacaggtgctcgccaccacacccggctaattttttgtatttttagtagagatggggtttcaccgtggtcttgatctcctgacctcatgacccgctcaactcagcctcccaaagtgctgggattacaggcgtgagccaccgcgcccggccctctcttgtctttttattgtggtaaaatgcacataaaattgactgtcttaaccatttttaggggtacagttcagtatatatattcgtaatgttgtacagccatcactgccatctacttcataagtttttcttctgtcaaaactgaacatctgtcttcattaaactccctatcatccattctttcctgtagtccctttctactttctgtctgtatgagtgtaactgctctggagacctcatgtaagtggattcctacaggatttgtgttttttttttggtgatctgcttatttttaatgcctctgtgcatttgtattatatactttcaaagtgatttcacaaaaccgtttcattttaggttaactcatttctgttgtttgtgaaatactgtgtatgattctgttctgtttctgtctaatttgtggaaatgttgtgggaagaaaatgaaataacaaatgagcatatgtcctgaaaataaaaatataaaaattctaagttagcatgctattgtagaatacaacgctatgataaaagtaggaaaaaaaaaggtttgaattctatctctgctacctgtgtaagctgggtgactttagataagctgtaacgtgtttgagccttactggctcatttttgaaatgtaatccctagttacacagttcttgtgggatcagatggtacatgtgaaacactgtgaaaaagcaactgcatagatatgttcattagccacctgagcgggaagcgtatcccattgcgatgcccatcatccaaagctatatgttatctttacttttttttttttgagacagagtcttgctctgttgcccaggctagagtgcagtggtgcaatctcagctcactgcaagctccacctcccgggttcacgctattctcctgccccagcctcccaagtagctgggactacaggcacccgccaccatgcctggctaaatttttgtatttttagtagagatggggtttcaccgtgttagccaggatggtcttgatctcctgacctcgtgatccgcccgcctcggcctcccaaagtgctgggattacaggcgtgagccactgcccctggccatctttactttttttgtgaaatgactttaaatacttggcaaacatttggtcattgttcatctgatctccaccatccaggtctcagagaacataatttctctctgaaagcttattgacccaggaaataagatctctttcaatctgagtgcgtcaggctttattcttgtcattttgtcttttgataattttcaaatggaattcatggaatgttggcttatattcatatattagtaaagtatgttgagacatcttaagattgatttgtggttctatatgccatattaaatcaaaataatagctgttaatggttttcacattagtctgtctcttgtttttatggagtaatgctgagagttcattatgcttgttctacagaagagcatgttaaaaggagtttttggagtcagagaggttattcttggtttcataggatacactctatactttttagggatttcagagtatatagctgaaggtgatattttatgtaaatatgttttatggaaacttattgctcatcgctgtttcctgttaactctcctaaaatataattaaacttttggaacttttttatagcttttgtgctagactaatttttgtctctaatgaggttatataaatggcagcttctgacgttttcaatgtaggaagtcatttaaaacttcatgtatattgtgaaaatgtagtctgctttaagctctctaaagtggtctaagttactggttcctaagtatggatgagcatcaaaatcatctggaaaatttgttaaaaatacagtaatgaaggcacctcactgtcctttttcccaaacatacttctgcattctgtttgagtaggtagggactacacatttttcacaagtatcctcttgggaatacccaggaatgcttacttgagcaacctcttactaatatgtaccttgataaggtggctaggtaaacataaatatacaaaaatccatagatctcccatatattagcataaatcagctagaaaatataacgtttaaagatctagttcacagtagcaccaatatatcgaactctaaggaatcgataaatatgcaaaaactttataaaaacttctgttaatgtttctgaaagatataggtgaccactttctagataggaagattttatattactaagttgaattttctctaaattaacacagaaatttaaaataatcttgatcaaaattctagtagaggtatttttgaacttgttcactgcaagaataaatacataattgcaaagaatatctcaaaatcatcaccaggcctggtgtggtggcccatgcctgtaatcccagcactttgggaggctgaggcaggcagatcacctgaggtcaagagtttgagaccagctggaccagtgcggtgaaacactgcctctactaaaaatacaaaaattagctgggtgtggtggtgcatgcctgtagtcccagctacttgggaggctgaggcaggagaattgcttgaacccaggaggtacaggttgcggtgagcctagatcgcaccactgcattccagcctgggcgacaagagcaaaattctgtctcaagaaaaaagagaaaaaagaaaaagaaatcaacactaatatggtgagacttaatgtatgtgacattaaaatagtgattggatgttaaaacaggtatagaacagaaagaagagtgtatgtgtgtatctgtatgaatttatgatgggtgtaacatatatgtattagggaaatgagggaaatgatacatttctctgactttgggagaacattatatctctacctcatattgcaaacaaacataaagttcagattaattacctaaatgtgaaaaaatgaaataatttctttaaaaaatgtaatcttagtttgaggaaggttaacattataaaggaaaaaactgttttgagtggaatatagttcaatatgtcaaaatccaccttcaacaaaattgaaagtaaattgaacttggggaaagtattgacagcatatagatcaaaggttactagcctgtgtaaagagcagttataaatatcgttaagaaaaacactgtcgacctgtcggcaccttgttctccgactcccagcctccagaactgtgacgagtaagtgcttattgtttaaaccacccagtctgtatgtggtattttgttatagaaactcaagctgattaggacactagtaatcagtagactgaaactgaaacaaaaataagaaccttttttacctgtcaaattggcaaacattaagaatattcagatttttgtcagaggtgatacaaccttctaagaaggcaatttgggaaaatataaagctttagattattatatgtctgacctagcagttttacctctagggtgcttacccctaggaaagtgtgtaatgatattggtgcagtgcccttcatcccattagaaaattaaaaataaccttaatggcctaccactaaaaggggattgaaaatttaagatatatttatttatgtgtttattgagatggagtcttgcactgtccgcctgggccagagtgcaatggtgcgatctcggctcactgcaacctctgcttcccgggttcatgtgattctcctgcctcagcctcctgagtagctgggattacaggctcacaccaccgcacccggctaattttttgtatttttagtagagatggggtttcactgtgttggccagactggtctcgaactcctgacctcatgatccgcgcccctcggcctcccagtgttgggattacaggtgtgagccactgcgcctggccagatacatttatacaagagaatgttagttaacattcatagatatttatattttgtttactttttattaaaaaaattttttttagagacaggatcttactctgtcacccaggcaggatgcagttgcacaatcatagcccactgcagcctgaactcctgggcttaagtgatccttctgcctcagccttttgagtacctgggggactttaggcagtgctactatacctggctaatttttaaatgttttatagatgagatcttgctgtattgcccaggctggtctagaattcctgggcccaagtgatcctcccaccttggcctcccaaagcgctgagattacaggcatgagccaccacttctgaccaatagatatttatatttgtgactggaaaatatattaacaatgtgttaaaaaattcagttaaaaaataatgaaagatttttgcttctggctaagatagaataacaaggacagcatttatcttcttgccttgaaatagttgaaaacggaagaaatatatgtaacagtggttttcaagttattgggcatcaggcaaagaagaatagttatcccaggaaaatgaatgtggagagccctacaatttccttacattactgcctggtcatggcaagaggaaaaactgagaggagactgaggctgagccagtggtttgctgggttgaggaggcagagctgggagtgcagagatgcaaggtggtgagagcccatatggaagaataccagggaagagagctgcagagggagctccggagacctgcaccctgccctctcagtaccctgtcatgtgtgtagctgagtactgacgagcacttgcttgtgcggaaatgacccagggctggaggtagagccacctgaaaggattagaaggaacagttgctgaaagtcacacagggccaggaagaatttctaatcacaccagttggagtggaaaacctcagctctcatagagcaggtagggtactcagaagggtttgcccacctagccccagactaagtttcgttactctgaccctacctaatattaaaaagagattaattaaattgttcgcaacaaaaataatatatttcagtgtttgtaacacgtagaagtgaattgtatgacaatagcataaaggctggaagagcagaaattgacatgtatttgcgctgggcagaataatgctcccctctttccccaaaagatatcaagtcctaatccctggagcctgtaaatattactttatatggaaaattgttttatgatgtgattaaattcaggatcttgagatgagggggctatcttggatgatctgggtaggcactaaatgcaatcacatatatataaaaaggaggcagagggagattttacacacagagagaaggccctgtgaagatggaacagaaagatttgaaggtgctggccttgaaaattggagtgatgaagctataagccaaggaatgcagcagccaccaaagctggaagaggcacggagcagttctcatttagagcctactccagagggaatgtggtgctgccaattccttttttttttttttttttaagatatcatttacccctttaagttggttttttttttttttttttttttttagtatttattgatcattcttgggtgtttcttggagagggggatttggcagggtcataggacaatagtggagggaaggtcagcagataaacatgtaaacaaaggtctctggttttcctaggcagagggccctgccacgttctgcagtgtttgtgtccctgggtacttgagattagggagtggtgatgactcttaacgagtatgctgccttcaagcatctgtttaacaaagcacatcttgcaccgcccttaatccatttaacccttagtggacacagcacatgtttcagagagcacggggttgggggtaaggttatagattaacagcatcccaaggcagaagaatttttcttagtacagaacaaaatggagtgtcctatgtctacttctttctacgcagacacagtaacaatctgatctctctttcttttcccacatttcctccttttctattcgacaaaactgccaccgtcatcatggactgttctcaatgagctattgggtacacctcccagatggggtggcggccgggcagaggggctcctcacttcccagatggggcggccgggcagaggcgccccccaacctcccagacggggcggcggctgggcgggggctgccccccacctcccggacggggcgggtggccgggcgggggctgcccaccacctcccggacggggcggctggccgggcgggggctgccccccacctcccggacggggcgggtggccgggcgggggctgccccccacctcccggacggggcggctggccgggcgggggctgccccccacctcccggacggagcggctgccgggcggaggggctcctcacttcccggacggggcggctgctgggcggaggggctcctcacttctcagacggggcggctggtcagagacgctcctcacctcccagacggggtggcagtggggcagagacattcttaagttcccagacggagtcacggccgggcagaggtgctcttcacatctcagacggggcggcggggcagaggtgctccccacttcccagacgatgggcggccgggcagagatgctcctcacttcctagatgggatgacagccgggaagaggcgctcctcacttcccagactgggcagccaggcagaggggctcctcacatcccagacgatgggcggccaggcagaaacgctcctcacttcctagacggggtggcggctgggcagaggccgcaatcttggcactttgggaggccaaggcaggcggctgggaggtgaaggttgtagtgacccgagatcacgccactgcactccagcctgggcaacactgagcactgagtgagcgagactccgtctgcaatcccggcacctcgggaggccgaggctggcagatcacttgcagtcaggagctggagaccagcccggccaacacggcgaaaccccgtctccaccaaaaaacacgaaaaccagtcagacatggcggtgcgtgcctgcaatcccaggcacttggcaggctgaggcaggagaatcaggtagggaggttgcagtgagtagagatggtggcagtacagtccagccttggctcggcatcagagggagactgtgcgagggcgagggcgagggcgagggaattccttaatttcagtttagtgatactaattttggactctggcctctaaaactgtgaaagaaaaaattttttgtttgtttgtttcttttaagccacatagtttgtggtaatttgttacagcagctgcaggaaactaatttatgctgcatgtgaaatggtgtaataaggtagattgtgatgaagatacatagtataaacaattaagcaacaactaaaagcacaacaaggaattatagctaatgaaccaaaaaaggagattagaataataaaaatggtgaatcccaaagaagccagaaataggggaagaggcaaataaaggaaagaaagagcttgatggtagatttcaacctaactatgtcaaaaaggacattacatgtaaaaggcagcgatttttcagattgaatggaaaagtaagactcggtatatgctgctgcctgcaagaaacacattctaaatataaaggcaaaaataacctacaggtaacagaacggaaagaagttcactgtgcttacaagaattagatgcaagctagactggttctgttaatatcagacaaagtggatttcaaagcaaaggctcttgcccaggatgagatggtcatttcataatgatgaaggggattcgttcatcagcctggcatagcaagctgaaatgtttatgcaccggactacagagctaaaatacatgaagcaaagcctgacagaactacaagtagaaacagacaaatccacagtgatagagatttcagtagccgctctcaatgatttgtagaacacgtagccataatatctggatctagaacacttgaccaacactgtcccctgtgcaacctcattggcatttacaggacactccacccagcaccagcagaagagacactctctcaagtgctcacagaatgtttgccaagatagagcagatgctgggccataaaacaagtctctaaattaaaagcattcaaattattcagagtatgttttctgacctcagtatcattaagttggaatatattataggaagataacctggaaaagcctcagatatgtggaaaaacccatttccacatggcccatgggtcagaagtgaagtcaaaagggaaatttgaaagtcttttggattgactgatataaaaacaatagatttctaaacttgtggggtgctgttacagcatagtaaatggaaatttctagcattaaatgcctgttttaggaaagaaagatttcaaatcaatgacctcagcttctacctttggaaacttgaaaatgacaagcaaatggaatccagagttaccagaagggccaggtacggtggcttatgcctgcagttctgccactttgggaggccgaggcaggtggattgtttgagactggcagttgaagaccagcctgggcagcctagggagaccccatatctacaaaaaacaaaaaaattagccaggtgtggtggcatgtgcctgtagtcccagctaaccaggagtctaaggtgggaggattgcttgagtctgggaggttgaggctgcagtgaactgtgattgtgccactgtgttccatcctgggcaacagaatgagaccctgtctcaaaaacaaaaacagttactagaagaatggacatcataaagataggagcagaagtcagtaaaatagaaaacaaaaatacataggaaatcaataaaaccaaaagctggttcatcaagaacatcaataaattggtaaagctgataggaaaaacagtgaagtcacaaattagcaatatcaggaatgagggagatgacagtagtatagattatatagatattaaaaggactgtatgaggcaggtgtggtggttcacgcctgtaatcccagcaccttgggaggccgaggtggacagatcacctgaggtcaggagtttgggaccagcctggccaacatggtgaaactctgtctctactaaaaatacaaaaattagttggtcgtggtgctgtgtgcctgtaatcccagctacttgggaggctgaggcaggagaattgcttgaacctgggaggcggaggttgcagtgagctgagattgtgccgttgcactccagcctgggtgacagagcaagactccatctcaaaacaaataaataaataaaaaggactatatggtaatattatgaacaactttatgccaataaatttgacaacttatagatgaaatggatgagttccttgaaagacacagaaactattaaagctctctcaagaagatatagataagctgattagccctatatctattttattgaatttaaatgtaaaaatcaatatttagttactggaaaacttttaagtgtggttggaaatggtatacgaactttttcaactgaattttatgaagtctaatcacaggtaaaggttttctgatgaaaatttagtgtctgaattgagatatactgtaaaaaatgttatatatcttaattatttcttcacattaattacatgttgaaataatactttgggtgtattgggttaaattaaatattatgaaaatcttgcctgttttctttttacttttgatgcgtcagctaggaaatataaaagtgtagctcacattctgtttctgttgacagtactgctttggagcacagtgtttgaatgatctatcatttcaaagacctttcctcagttcgttattcatggctgtctgtattccacatagataaggtctgaaatactgctaagtggcatgttttgttttatgcttttataagtttgttgatcattactgatgtggacttttggtgcctcttaggctcattgctatcttccaaccattgtttgcaatttttacctagagataaagagaaagagacatttggtttcagagtagttagattgggatcatgaaagagcaacctcattttgatgcttcaaaaatagcacatcccccgtattactgggatttgctattcttgggattacttcaagaacatccttgtgttactggtttggatgcttctgaatgctgtgaagtcagtttcatgtacatggctcatcagtttagctctctcttggctttgtttagacagttggagcatgatggcctaaacagcttctttcaattaaacattttaaaatagtttacaaatagtaaacaaactccagtttttgtgactctttgtctcgcacaacaaaaacacaatctgaccatgatcatctggcatcttagggtgaaatatggttatactttggcccataccgaaagcaagattaaaaaggggcaggagagatagactgctgaactgattttcaaggttccaagaatattgtaggttaagagtaaaagtaaacttttggtagaaagcagtgggttgtctaggattgaagtatctgaagtttttaaacgaaaatttaaaaagaaaaatgagaattgccttacaagtacaatctcttcttttttaaaaaataaactttattttgaaatagttttagatttatagaaaaaaattagatagggtaggaagttttcatataccctacatccagttaccccagttattatcatcctaatttagtgtgagacattttcatgtttaatgaatcaatattgatatgctattaacttaagtccagactttattcagattttcttaatttctatgtaatgtcctttttctgttccagaattccatgcaggacaccggatacctcattacatttcattgtcatgtcaccttaggctcctcttgacagtttctcttctttttttgcttagaaattctccagaatttcagaaacttctgggcatcgctatggaactttttctgctgtgcagtgatgacgcagagtcagatgtcaggatggtggctgacgaatgcctcaacaaagttatcaaagtaagaaccgtgtggatgatgttctcctcagagctatcattgttgtaggctgagagaagaagcgatcattgagtgttcttctgttttgagtccctgaggatgtctgcacttttttcctttctgatgtatggtttggaggtgctctgttgtatggtttggaggtgctctgttgtatggtttggaggtgctctattgtatggtttggaggtgctctgttgtatggtttggaggtgctcttgtatggtttggaggtgctcttgtatggtttggaggtgctctgttgtatggtttggaggtggtcttgtatggtttgcaggtgctctattgcatggtttgcaggtgctctattgtatggtttggaagtgctcttgtatggtttggaggtgctcttgtatggtttggagatgctctattgtatggtttgcaggtgctctattgtatggtttggaagtgctcttgtatggtttggaggtgctcttgtatggtttggaggtgctctgttgtatggtttggaggtgctctgttgtatggtttggaggtgctcttgtatggtttggaggtgctctattgtatggtttggagatgctctggtatctgcctgcattgcttgccacacctgcccggtcagaaggcgctatgttgacaattgtgcctgcacggtgcctaggtcaatgaagggaaccgatggtagccactggatgctcctgggaaaatgtcactacaggcaccagagaagccagagctatgcccaaatttctatgagtctcagttttcttaaccataaaatgggatcaatgtttttgtggcatgtgtatgagtgtgtgtctgtgtatgtgtgaggattaaattgtgtatgtgtgaggactaattgccactactggatcctcaaagtggtaagaagtgttcttattaataatgacatccttacactcttacccagcaagattgatgggtgtggcactgcttctctttttccatcacatggtttccatggtatccttttgcccagggaatctttgctttgtggctagcactttgttgtttggctaatcacgctttctgtggtcaggacgctggcttctctggagccatgggattctagctccctgtcttgtccctagagtggtcactgtcttctctctccgcttgcaattcctgctttgctcgcatctcacttatgcagtgacgtatatcagtttcaccttgttctccgtgcctgctgatcattggcaccacttgcatggtgccatttagggcctgcttccagttaagcttgcttctccacaggcctaaatatccttgcttgcttcttttattctcactggcaggaccagggcggtctgtctttgcatgagacagggtctcgctcagtcacccaggctggagtgcagtggctgatcacggctcattgcagccttgagctaccgggctcaagctatcctcctggcttggccccttgagtagctgggactacaggcgtgcaccaccatgcccagctaatttttaaaattatttgtagagatgggatctcgccaggttgcccaggctggtcttgaacgcctgggctcaagtgatcctccctccttggtttcccaaagtgctgggatcacaggtgtgagccactgtgcctggcccttgatgtttcagttcttgatatttgatcctcagagtcagaaaatctaaaaagagggctatcccaggttgccttggttcatggcaaatgggacgttaagagggcagagagaatatgaacagaaactgttctaatattggtcatttaatgtgtaagtattgttcttttttaaacctccttcattttttttccaggaattgctggacacagtggcttggtgtgtgtctgaggactgtaggccatggccctaggttgtggttttaggtctcaggtgctcttcctggctgtctccttgcttctttcccatgtcctcttctttgtttccagccatttctcccttatgcttaagtttggtgcagcagggtttggctgctctcagattcctgcttcctcagatgctgtagttgtcaggcccagcgggctggcagcgggatcaggatctggctaggtttgctctcactgtggcagagtagggggaggcgtgggagagcacgtgtgaccccaggccagctgtagggagcataggcatggtcacgtagccttcaggtcctagactttgtcttctcatgagtatggctgtgtgtgtatggtgaaaactaggttctacttagcccaagaaaatgggcacattttgcatgtggtttctgtagagaaatgcactgggtatctgacatagcctggcagcatgcctccctcaggtaggttagtctcaggcggtgaagcacgtgtgtccagcaagaacttcatatgtggcataaagtctccgttctgtgaggtgctggcaaatcaccaccaccgtcaagaggctgaagtgatttttgtctagggaggcaggaaaggcttcctggagtcagcagccagtaggtgaaagagtagattggagaccttcttaatcatcaccgcctcttgtctcaaggggtgccaggaagctgtggaggctgaacccatcttatgctgccagagagtgggacaccatgagggtcaggtcaaggggttgtaccttgtttggtagagaattaggggctcttgaagactttggatgtggtcaggggagtgtatcatttaggaagagtgacccggtgaggacgtggggtagaggaggacaggtgggagggagtccaggtgggagtgagtagacccagcaggagtgcagggcctcgagccaggatggtggcagggctgtgaggagaggcagccacctgtgtgtctgcggaagcaggggcaagagggaagaggccagcagcgtgctgccatcacccagcgactggcgtagattgtgagagaccattccctgctcttaggaggggctgagttttagttttctcttgttatacaataagcttggtatttgtttacaaaacatttgtaaagctaaatcaaggtttgataaggcttctagttttatttaagaagtaatgttgaaataaatgtttgtccaattcgctttgctcatttaaggactttcagtacaaactgcaacaacaggattaggatttaaacgtttctgagatgtttttactcctcagaatttcccagaatgtgatctggttttgattttcaagcttgctgacccaataggttaacccacaagttttacgaagaccatctcagtccacttacatcaactgcccatgccacggttaaagagatcatcgactgatgtttggcacagcttcctccctcttgggtgggcaagcatttggaagagaaggctcctatgggtgagagtggggcaccaaagtcttccctgtcccatcccctagcttgagaagcccttctctaatgtggactttgtgccgttagcatcgttactagcttgaagttgaccatctggacgtactttctggtttagcctcacaagtgagcaaggagggttgagagatgtgctgtgaggaatgtggggccccagctggcagcaggctctgggtcaggggggcagggaccacgggcatacctgacagtgaggaggggccacacctgcagaaaaggatgcaggactccgccttgggaagtgttctaggccagagcgagggtctgtggtttataagtacacccacagtgctcgggaccctgcagatgtccagggtgccgtctgagcccgtatcatccaacagaatgttctgctagtgaagattaaagatttactccaggggctttaggatttattatatatatataaatcctatatatataattttttttttttttttttttgagatggagtttcgctcttgttgcccaggctggagtgcaatggcgtgatcttggctcactgcaacctccgcctcccgggttcaaactattctcctgcctcagcctctcgagtagctgggattacaggcgcccaccaccacacccggctaatttttgtattttttagtagagacggagtttctccatgttggtcaggctggtcttgaactcctgacctcaggtgatctgcccgccttggcctcccaaagtgctgggattacaggcatgagccaccccacctggccaggatttattgtatttgaaccatctaccattttaattttgatgttatgtagtatttgatgataatgaaagttaaattgtttttctttccatttttctgtttaagtgaatgacctgtatctagtttattcagtaacttcctgcatatatttgtttctttcattcttaatgaatatattcttaatttagttgctattatgttttgctttgccccaaaattgaaatcttagtttccttttagctcgttttagaactagtgatgggatgtgtcttccataaatctcttgtgatttgttgtaggctttgatggattctaatcttccaaggttacagctcgagctctataaggaaattaaaaaggtgggccttgcttttcttttttaaaaatgttttaaattttaaatttttataggtacacgtattttgtaggtacatgtaaatgtatatatttatggggtacatgagatattttgatacaggtatacaatacataataatcacaccatggaaagttggatatccatgccctcaagcatttatcctttgtgttacaaacaatccagttacatgctttacttattttattttatttttgagacagagtcttgctttcacccatgctagagtacagtggcatgaccttggctcactgcaacctccgcctcccgggttcaaccgaactttgggctggtctcaaactcctgacctcaggtgatccgcccgcctcggcctcccaaagtgttgggattacaggcgtgagccactgtgccgggcctgattgtacattttaaaataactaaaacagtcagggcacagtggctcatgcctgtaatcccagcattttgggaggctgaggcaggtgatcacctgagatcaggagttcgagaccagcctggccaacatggagaaaccctgtctctactaaaaatacaaaaattagccaagtgtggtggcgggcgcctgtaatcctggctactcgggaggctgaggtaggggaatcgcttgaacctgggggtggaggttgcagtgagccgagatcacgccactgcattccagcctgagcgacagagtgagactttgtctcaaaaaataaaaatgaaataaaattgggccgggtgtggtggctcacaccttagtcccagcactttgggaacctgaggcaggtggatgcttgagaccaggagtttgagaccagcatgggcaacatggcaaaacgctgtctgtacagaaattagctgggtgtggtggtgcacaactatagtctcagctacttgggagattgaggtgggaggattaattgagcctggaaggttgaatctataggtagctgagattgtgccactgcccttcagcctgggcgaccaagtgagaccctgtctcaaaagaaaaacaaaaaaacaaaaaacaaaccactattatcgactatatattattgtctatgatccctctgctgtgctgtcgaataccaggtcttgggcccttatttccatcactgagcaaacttcactctgttaagcagcaggtgtgggatttcatcgttattcagtaattcacaatgttagaaggaaatgctgtttggtagacgattgctttacttttcttcaaaaggttactctttattagatgagatgagaattaaaaatggtaacttactttatatctttataattgaagcccactagaccttaaagtagttaccagatgttttatgcatttaaatggccttttctctaaaattagaaagtaacaaggaaagaaaatgcttcgtttctatgcaaccctcttggtgactagtatgtgactcttaatgcaaccctcattgcaccccctcagaatggtgcccctcggagtttgcgtgctgccctgtggaggtttgctgagctggctcacctggttcggcctcagaaatgcaggtaagttgtacactctggatgttggtttttgtcgggggccagctgctactgatcctttatgtctcagctcagatgtcatttcaaaagtctgctctgccctctccaaattgcagtcgaccttgccctgtttatgtttccctcatagcactaatccatgtcagaaattgtcacgtacagtctatctgtgtgcttgtttattttctatcccacccttccgcaagagacttatgggatgtgtgccccaggacagcaggggtcttactgtcttatgctctgttgcagcccagcagcgataacagtgtctgcacatagtacttgcttaaaagatacttgccaaattgttgaaggttgaggtaccaatttcattattgctgactataggagttatagcaaaatatccatttgtctgttacatgagttaaaaatatggttgttgcactgtgaatagtttggtttagtcaaaacagttgtatcttaacggattgagaaacaaaagcaggaccacttttcatcagctccctccttctccttaaccagcaatacatgctgatgctgatatcccatagaccctcagctccatcctgagtcactgggaatgtggtctaaaccctcactattaatatgaactgagtttcaataagaatcttatatgggtcgggcatagtggctcatacctttgatcccagcacttcaggaggccaaggcaggtggattgcttgacccagactaggcaacatggtgaaacgccgcctctacaaaaaatacaaaacttagccaggcatggtggtgcgtgcctgtggtcacagccactcgagaggctgaggtgggaggatcacttgagcctgggaggtggaggtcgtgttgagccaagatcgcaccactgcactccagcctgggcaacagagtgagacctgtctcaaaaaaaccaaaatccagaaaagaacttatatggctgcagaggtataatcactaaggaaatttccttttgtataatcttttttcttttactatcatttaaaaaaatgtgttatatttctgaagcaacacatccaggttctgcacatagcagccaaagtgaccttaaagaatataactgggtcttgtcattcccttatttaaactcttgtacccatttcccagtgccgtttagatagagattccagactcgtcaatggctctgtcacctcagacaccctgcattgactcattagtctgattagagtcaggtttttcttcctcctgatggtttttttttcccccttagttctcagcggaacagtcacttccttagggaggtttccccagccaccctctgaggccgtgcttgttgccagactctgccactagagggcagggctgcaccactcctggcacctcgcacccggcctgccctgtcactctgtgtgttgggtgaattcctgtgatctgtgactcactgctctgtgtcctacacattcggcttttcttctctccccacaaccccattttataattctcctttttcaggaaagctttattcccatttaaaaatttttgtttttaaaatggtattttcttacacttattttctaattaaaaatgagtgttttaagaagtattatgatttactgcaaataatttttaaacccagccttttagatcctctgtgatcataagagaaatgaaggatgtctcccaacacttgagcttcatccacatttcatcctcctgttctttcagctgagttttccccatcccattagggactgttggaatataaaactggcttttccctaacagggaatgaattgcttctgtttctcctgaaggagagctggaagaatgacttgcgttcttttgcatacacaggccttacctggtgaaccttctgccgtgcctgactcgaacaagcaagagacccgaagaatcagtccaggagaccttggctgcagctgttcccaaaattatggcttcttttggcaattttgcaaatgacaatgaaattaaggtatgattgttgcctcaggtcacaaacatgcgagtgatgctgtgagtgagtctgtggagggtgagggcttctgaacagggagtcctgtgggagtgcttcttggggtatgttgtatgtcgtaatttagactaccatcatttgtgttatttttgaggcacctaaggacttctttccacttctcatttcttactgtggggtgaagagttgaattgggagatggtttctagatgcaaattgaaaaggcatttttccagagcagatttgttttcggcgtactagagtgactctttaacctagctgcgggaagatgactgtgccaagactgcaggtaggagaaagctcactgacgaggccttgtgggtctgaacgtcctgcagctatcagagcctgttggcttcctgttgtgcattccaacaaatcatcttcaaacccactttagtgttttgtttataatgtccagaaatagtgaccctgtcacatgctctacagattacaggattcttagcctcttcctttttggtaggtcagtcctgggtttgagcccaagtgaccctcctgggaggtgatgatacacactgggtagagtggaatcagatggacttggattagaattctgtcctctttactagttattttcctctaggcaaactgcccaacagctctaagctatttccttcgtattctgaaaaataagccttaatgggacccatatagggcaactctgagagtaaaataaaggaatatgtgttagagtgtagcatagtcacccacgggaagggcttagatgttagctgctactgctcttattagctgaatgatttggaataaactgttagcctctctcatgttttttctcttgagcttcgaagttttcttgttaatactaaggagatattcaaactagtcatggggttttggaatgacgaagggagatgatgaatctaaagaatttagtgtaatatttcttcatgctcagtaaatggtagtttctgctgctgttatttttattaccatctctttggaatgggagtaggtgctcctttgtggtcagaggctgtgagagctccacagcgccagtttgcccatctgtacactggggtctgttgaaggcagtcccctctgtgatatctctggctgtcagagctcagatgatagatggtatttttgtactcttagttctcatcattttcatgatttcgatcaccatttgagtatgatgatgctaacactttgttgaacgtagaatccgttaattacttccttcctgaacctttggcattaaaaaaaatctattctgctacctctctgctcatttatggttattcaaatttattatcaagagcctggtacagtggcttgtgcctataattgtagctacttgggaggctgaggtaggaggattgcttgaggccaggagtttgagaccagcctgggcaagatagtgagaccctatctctaaaaaaactgaaaaaaaattagctggacatgatggcatgtgcctgtggtcctagctactcaggaggctgagacaggaggctcggttgagcccaggagttggagttcgaggctacactgagctgtgattgtgccaccacactccagcatgggtggtaaaacaagatgccatttcttaaaaaaaaaaaatatatatatatatattatcaatgaaattcagtagtaccaacaggattataaacaaagatagtagttcccttcctactttttctcttaatccttgtgtctcacaggcaaacataactcttagtatttcttccaatatttactttcatgtttctttctttctttctttttttttctttgagatggagttttgctcttgttgccaaggctggagtgcaatgacgcaatcttggctcaccacaacctctgtctcccgggttcaagcgattctcctgcctcagcctcctagtagctgggattacaggcatgcatcaccacgctcggctaattttgtacttttagtagagatggggtttctccgggttggtcaggctggtctcgaactcctgacctcaggtgatcctcccacctcagcctcccaaagtgctgggattacaggcgtgagccactgcgcccagcaacttccacatttctaaataacatgcttctactgctattttttttttcaattttagacatttttttactttcactatagttctatcagaattcagtgtgtacgttattatgcctaagtaaatagtcatggttgcttacgtattatatttctttgattgtgtttcttatttgatgagaaagctgtgttttttgctctgggttgaaactggagagaggacctggggaggaggaggaggacagatgaagttggtgactgtaccttcatggccatagctgggttctcagcacccggggatctgctgatcacctactcataggccaggcccctatcgaagttctaggtgacccagtgctggggacgggggggccacctgcaaggtctaatcatggaggtgggggctacagtgttggcttgtgctggggccagcatccttaggaaggcatcttggaggtggaggagacagccgcccacttcttgattggggccttcagcagcaccagcttcttgggcaggctggtgctggctttcatcaccatgtcgtgttcaatcttcttccagatcctgacttctaggttcagctttcctcagaccctggttcctttcagaggccattgctgctgccttgctctttgctggcttgtgccttgattatatgtctttgtacaactttttgttttcctggagttaatcttcacatctgttttcttggagttaatcgttacctctatatcgcttgcttattattctttggcctttttgtcttctcacaccttccaacttctttgtaatatgtgtttagtacaatttttcatgacaggtagtttactgaatcagtttttccccagtgtggtcatccaacttgagttatccagctctctgccccagtctgggcaggttgatcttcaggtctgtagtacacttgtatcctaggacttctctttgccattagcctggaatttcctttgcagttctcccgttggatgcccagttcctagatgccatatgtttttctatcgtctagtagcttcctgagagaagatgaatgggagggaaattgtatgaggttttgcattcataaaaatgccattttttttcctgtacacttggctgggtatggtgttctggggtagaaatcattttccctcagaaatgcaaagtctttgccctgttgtcttaaaatctccaacgtgacccgattccttaacctatgaatgtacttttctttggaagctttccatttttggggaggtgaagtgctaggtacttagtaggccttttaatttggaaacttacatcccttcagttctgggaaaattttcttaacatttctctgagaagttcttgccttttattttctgtgttctctcctgaaattggttagttggatgttggtcctcctagattgactcacatcttacctttttcttttctttttctggtactttttagatatccatctcaaactcttctattcattgttatgtttttaacttctttcttttctttgtctcttgatggggtcttgccctgttgcccaggttgtggtgcagtggtgcgatcatagctcactgcagcctcaaattcctgggctcaagcagctgttctgcctcaccctcccaagtagttgggactacaggtatgcaccaccacgtccagctattttctttacttttttttttttttttttgagatggagtcctactctgtcgcccaggctagagtgcggtggtgggattttggctcacttaagcctctgcctcccaggttcaagcagttctcctgcctcagcctctcaagtagctgggattacaggtgtgcaccaccatgcccggctaatttttgtatttttagtagagccagagtttcaccatgttggccaggctggtctcgaacgcctgacctcaggtgatccgcctgccttggcctccgaaagtgccgggattacaggcgtgagcccatcattagatctttaaataccagtatctataagtcttttcctcttgagtcagctagtatccctggaaggaaattactcattttcctgcttggaggctataagcttggctatgtttatcctgcaaccggggactggaagggaggggactgacagtgttgctggtcagggtgccctcttactttttgttttctgtgtgcatctcacgtctgtcctcagcctatgtaaacacctcttgagattatccctctcaatctttgccggaggtgggggaggggctgcttcctgggctgccttggattggagggaagacctcaggtgagtgggtgggaatttgcccaaggagccatgagaccagccactatttcaccctctccatccctccactttcagatgtatgtggcgcctccaaagcccgagctcttcttggcgtctgtggcttcaataagcttgctttttgctggtatccctcctaccctcccctgtccccagcaaagcttgcatttgaacttcttcctacgggctaacaaatcagtcagttatgtagctcttgttactttttagcttccgaagttttgttgacacccgtagtctgctaatgtccctgttctgttctttctgttcgtgtaaatatatgctttatacaacttctttacatgatttttgtggggtttctgggtagcagagcttcacaagttcaatccagcgtgttggattagaaatctcccaccctctggtttattcttattctcaaaattacctgccaaacactgatactcccttgtttttccttttcctgacaggaaatgtacataccatacaggacagaaatcattagtgtatcccttggtgaataaccacaaagtgaacttaacccttgtaaccgccacccaggtcaagacagaatattaccaagcactcagaagcctctcccctattcccccgtcactgctcctgccttcctccccaaggtcatgactgctggcttctaattccagagtctgtttttaaattctgtgtacatagaccatggattaagtgttctttttgtctggtttattttggtcgacattaagttcatgagagtcttctatattatcgtgtgtattagtattcctgtagttttaggagcttcatagcattccattgtagggatataccacagtttattcattgtattatcactgggttgtttctagttcttggctattgcgagcagtgctactgtgaccactcttaggtgtgtcttttggagtacatgtgcaggtttccatcttgcacagctagaggtggagttgttgggtgatagggtgtgtgcatctcagctgcagtagaaactgccaaatagctttccttgagtgcttgtaccagctcacccttttgccactgtgtatggggattccaggagctctggtcctcgctagcacttggaattgctgatgcttttactcttagccttcctgatgggtgttttctggaatcacattatgattttaatttccattccttaaagtacccttggctctgaagtttaatgattcatgcatctcttcccttttgaagtactcttacaggtatgttgtgcatgtgttgaaaagtggcactatctattctaaaatacagtatgcctcctctgtgtttgaacagttgtagcgtggccttggggcctcctgttagctggcttggagaagggattcttgggattgtagagattagacctgaggaggccccttggagctctctgactaaattttattctttattattccaaactatttaagctcaccgtgtgctgactcatcataataatgagtagctctcattgtgcttgtctatttggactcatacaatgattttttttttttctttgagacagagtcttgctctgttgcctaggctggagtgcagtggcacaatctcggctcactgcagcctccacctcccaggttcaagtgattcttgtgcctcagcttctcaagtagctgagactgcaggtgcgtaccaccatgcctggctaatgtttgtatttttagtagagacggggtttcaccatgttggccaggttggtctcaaactcctgacctcaagtgatctgccttcttcagcctcccaaagtgctgggattacaggtgtgagccactgagcttggccaaagtagttttttaagatgttagtatcttttcttgcagctaaaaaagtttgtcagagatgattctactttgttctccaggtgttttctcagggagaaattggaggcagtaagccactgggggagtcctgtggctggggggtggggtagtcctgtggctccttgtcagggagtcctgtggctggcaaggagagaagtcctgtggctgggttgggagggagtcctgtggctggggtctcatcctgtgcctaacagtgtccagaggtgccgagaccagctcagtcggggagaccctaacccagcagcgctagaggaattaaagacacacacacagaaatatagaggtgtgaagtgggaaatcaggggtctcacagcctttagagctgagagccctgaacagagatttacccacatatttattaatagcaaaccagtcattagcattgtttctatagatgttaaattaactaaaagtatcccttatgggaaacgaggggatgggccgaattaaaagaagaggttgggctagttaaccgcagcaggagcatgtccttaaggcacagatcgctcatgctattgtttgtggcttaagaatgcctttaagcggttttccaccctgggtgggccaggtgttccttgccctcattcctgtcaacccacaaccttccagtgtgggcattagggccattatgaacatgttacagtgcttcagagattttgtttatggccagttttggggccagtttatggccagattttggggggcctgctcccaatacagaggtctcgtgtaaattccctgggaggcgataagcctctgagaaacagactatgctaaccacgccatgaaagagaaacttatttataaatcagatgccagttactagtttactgcttatttgcccaggcgtagctctgacagagtccccgactcatagtgcttgctcagtgcatgctgaacaatgattggaatcaagtcatggctcagagcatagttttgaataatgggaaatggatgttcttaagtaacatagtcaccaagataatgcgactagctgggtcaccccttttcaattttaggatatttttatcaagatttaaatggccatcattagagttatagcactttctcctttggattgtcctagaggcccatgagaaagtattccctaatttcttaggagaacagtttgtgggtagtatgcggtcatgtccagttaaattgcagatatttccgatcgaagatgttccagtcctgagaacttcgtgacattagcaggacttctacaagccatctcttagggtggggcatttactgcagttggctagtactcttttctccttaactttgtcatttgttgatttttttttaactgtccccaaatactgtgggcagagtgtatctagaattgaggcctccaccattgcggagaggacatggatgctgagcagtcccctgagtgaaggttataaagaagcaaatagactacacatgtctgtaaactgctcttgagtgtcccaaatttggggtacttcagttcagctgtaggaaaagcctcaaactgtttatactttgcaagaattggaaacttctaattcacgttaagttttatgtaatacatgataagcttcataggagcttcatcttttatctacttggacttttgcttccgtaggttttgttaaaggccttcatagcgaacctgaagtcaagctcccccaccattcggcggacagcggctggatcagcagtgagcatctgccagcactcaagaaggacacaatatttctatagttggctactaaatgtgctcttaggtaaggtggaggcatatgagtggaagagtctccagcatgtactcaagatagacctttgaaataaataaaaccagatgatccctcagcttctagaccaggctatttggcactggttgattgaatgtgaactgcactggggctgctgtgagcccgcatgggtctctgtgaccctgcagatgcagccgtgcccagggactgggcagtgggtgtgggctggtgtgagccctgtctgccacccagggcctggccctctgtctgtgtcggccatgactatggtgagtcttgtaggcttgagactgtgcctcgggttcctgcgggttctctgtaggtcagttgacagtttctcctgttgtttgggtaactgtggaaacgaacactggcaagtgctgaagcgagcatgtggacgtgcgatatgaaataacgacctggctttcaaaggcagtgaggctctctggaaaggaccttgctgagctagggatgtgggtgtgtagccattcccagtgggcctcatggcgtactcgttcatgatcatgtttgtgccatcttgatctctcaggatctcttcttttttaacagattaagccgggaatctccaaacagtgagtcagatgttaagatgtcttgcttccacccccacaggcttactcgttcctgtcgaggatgaacactccactctgctgattcttggcgtgctgctcaccctgaggtatttggtgcccttgctgcagcagcaggtcaaggacacaagcctgaaaggcagcttcggagtgacaaggaaagaaatggaagtctctccttctgcagagcagcttgtccaggtaggagcacagggtttactctaggccctgcatgtgaatgactgacattcaaagaaccgattaatttggaagagaagcggcagaaccgagagttagaggtgtggactctggagctgcgctgctcgtttccaaccctaggtgctgacctctagctgtcttccctctgtatgtccctgtcaccgtgagtcaaatgcgggtgatgcctcctcaggtgccgtgttacctaagcctctcagagaccactgctaccctgtttctaaaaccagaggtcacgatatgtgttcatccacccagtaaatactgattgagcacccactgtgtgctaggctctgggataggggctgggtatacaatggtgagtatttcagctgcagcttctgccccgtggaggctgtggcctagcacactggtctaggcacggtggtatatgctcactcaaggagatagggacgtggtcgtttggggtgtcggaacaaaatgtcggaacttctctttccaatgcagagaaaccttgcagtaattctaatgtactgtgattggcagttgacttcagttctttgtagcacgcttactcaggttatttcactaactatgtaaccatgcagcctcattttaagcaattggattttttgaactttacttaaaatgttatgtcagggtttttattgtgcttaatgtgtgccatttagctaagttttgtaggatacgaaattgtaagtggcttaaaatgattcttaatagaatcatgaattgaagataatgctaataatttaagcactgagttaggtagtgtttgtaaaatgcttagaatgcttcctggcacatgttaaggccatgtaagtgctgcgtgttgataaacagctgagcaaaagtggactcttaagaaagtattggggctgagagttctgttccaaccagctgccctttggttatttttcagaataaaagcagagtctcatgggatatgacatttatatttccttcacaaaaaacactgctgagtgttttgttgagtaaaaagggtgtagccatggtaataatacatttaaaatatagtttatttcatctttaccttgccttgttttttttttaagctagctttttattgagaattccacacatacaaaagtatcaactcatgaccagttatatttcatttataatcctacttctccctttttttattatttgaaagcaaaccccaattatcctcttatttcatctataagtatttcagtatctctatagatgaggactcttctttatttttaaaactttatttttaaaatgatggtcagatgcagtgttcatgcctgtaatcccagaactttgggaggccaagctgggcggatcacttgaacctgggagtttgagaccagcccgggaaacatggcgaaaccccatgtcttaaagaaaaaaatcagccaagtgtggtgatgcatgcctgtagtcccagctacttgggaggctgagatgggagggtcacatgagcctggaagatcaaggctgcagtgatccatgattgtaccactgcactccatcctgggtgatggagcaagattctgtctcaaaaaaacaaaactgcaaaacaacgtcacaaaacagtgccattgttagacctgaaaatattaaacatttcctacatcaaatacccaccaactcattatcaatttttctctctactcttttggaatcagcatctaaataaaattggtcgataaggattgtaaatctctttgatgaactggttcccctccatcccagtttttttcccttagagttcatttattgagaaaccagattgtttgtcttctaagttttcctgtggtctgatatactgcttccatctccactgtgtaaattaacacctttttctcttctctgtatttcctgtaaatcaataattggaggaaaagccttgtcagatttagtgtatattttatatctgagtccagtatttcttatataatattttaagataagtgtactcttttaaaaagtattgaaactatatgctcaattttttttaactgatgcttttaagaaggctgcttgatcataaaagtttagagatcattggtctgatgggaaaagcaaataattactaaaccgtttagcaaggttgaggtgcacatggtggggcctggagaagttcagtcatgagccgtcacttatgggcacgtggaatctgacccggcacagagttgggagaagacaggagctttatagacagaaaatgtggtctttgctaagtcccaggagtgaaagggtgagacagtgctcacagcacacgagtgtgggtgcgtagacagagcaagggtgggtcctgaaaaggcctgcaggctttctcatagattagcaagagtgctggttacggaggtttctaacatttgtgaacagatcgaaactgtgttaaattgggattgcagtaatcctggaaggacagggatagagggtgaaggggaaaaaagggtatggatgtgagacttaattgctgattttcttaagacctttctccaaagtaaataaatgatgtggcacatttttgaactggcaaattctaaactctagatatgattatctctataacatatcttactccatcttcttttgactaaaaactgttcttaattaaattaccatgagacgttcaattcagcaaatgtagtttggctaaccatatttaattagaatttaatataatcctaggcctggccaaactattaagcaagtgtgggcaaaatattgataattttagatatgcaggaacttagtttgctttccatgtgtgcttttcgaaaaaggaataaattgaaaaatagaggaagccctgaaatccaagaagcaaactctctcacctaggcatgcagtaaaagcaattctaggatgattgctgtttggcgcgtagttcgtattagaaaccattcttcttgaataaatagtatgtttaagaagctgggcagagggaaggcatatgcatatattatcaacaaggagggagaaaaaggcaattagtaaccatccataggagggtcagcaagatttataaaggaaatttgtgatccaagtatgaagcaaaataaggtgcagaataaattttaagcaagtaatagattagagtaagagaacccatttgaccattaaccttgggacattctctttcaaatgacatggagtagtactgaaatctttctttctttctgagtctaggttattgtgactggactcagaaagaaatatttcattattgcagtgaataacatttgtgaacattattgttcataaattatgcagtgaataacatttatgaacacgtgatgtgtaagatacatactgtttatttttagttaagttttttggctcaacttctaggcagagaacattaaatgtaaatagtgttacctaggagcatgtaaatggaaatctccatagtatgaaagcagtgctgttgctaacagaatttaggagggggcagatgaggtgaaggaaatgtgggtgctgatttccttattacattgagaggagccaggagattctttgttcaaaatggatggcttaagaagtcaaagtataagctgattacgtagagcaggtacccaaaaatgttttgtgtaaggggccagatagtaaatattttcagtcttgcaggccatcccaagtctgtggcagctactcaacactacctttgtagcatgaaagcagccacaggcagcccataaatgtggctctgttccggtgaaactttaggtacaaaagcaggtgcaggccagacctgacctgtgcactgtggtttgctgacctgggattcaggggtatagaagttaccatcagaagagctaaaagtgagactttttactttatactcttctacactgtctgattttgaaaaaaagaaacatgtattttataatattaaagatagggttggcaaatagcaaataaaaatacagaataccagtgaaatttgaacttcagatacattatgagtaattttatggtgtaagtatattccaaatcatgtgggacatacttacactacaaaattatttgttgtttgtttacagtttaaatttgagtgccttgtattttatctggcaactgtaattaaagggaaaaagaataaattcattatgttcatataatgtgatatagcaggggtccccaacccccaggctgcagagtggtactggtccatgggtccccaacccccaggctgcagagcggtattggtccatggcctgttaggaaccaggctgcccagcaggaagtgagcagcaggtgagctggcattcccacctgagcaccgcctcctgtcagatcagtggcagcattagattcccataggagtgcaaaccctattgtgaactgcacatgtgaggggtctaggttgtgcgctccttatgagaatctaatgcctgatgatctgaggtggaacagtctcgtcttgaaaccatcccctggccctgtggaaaaattgtctcccatgaaaccagtctctggtgccagaaaggttgggtagcactgtgatatagtattaaaagtgctaataaatatggcatactgcctttaaaatgtctggtagctctttctcagtggcactcataatagtgttttttgatttttaaatgtgtgtcaagctgactctcccctccgtgtatgctgggctttattttccctttcctagtcaccagttttgggaaatagagatcttcattctcatgctgctcctctagtgcaagtgctccatttatttttaaggaattaatataacaaaaaatcatgggaatttagaaaacaacatggaagctaatgatcacattggtggaagtgatagggaaatatttagggggagaagttaaggtataaactttgtcaatgaagtcctattaaaaacaacaaaaaagtgaagcttaggatgcattttataaactctgaccagaacacctgtgtttctctgtttctaggtttatgaactgacgttacatcatacacagcaccaagaccacaatgttgtgaccggagccctggagctgttgcagcagctcttcagaacgcctccacccgagcttctgcaaaccctgaccgcagtcgggggcattgggcagctcaccgctgctaaggaggagtctggtggccgaagccgtagtgggagtattgtggaacttataggcaagttattagcaaggtctactcttacaattaactttgcagtaatactagttacactctattgattatgggcctgccctgtgctaagcagtctgcattccatcttccttgccaaaacttataatacaaatttcatctttattttataaataggggagttgggctgggtgtggtggctcacgcctgtaatttcagcactttggaaggatcgcttcagcccaggagtttgagacaacctggccaagtgagaccctgtctctacaaaaaaaaaaaaaaaaaaaaaattagctgggcatggtggcacatgcctgtagtcccagctgctttggaggctgaggtggtaggattgcttaagcccaagaggttgaggctgcagtgaatcttgatggcagctgcactgagcctggtgacagagcaagatgctgtctcaaaataaatttaaaaataaaataagagaattaaagtttagcaggttgggtggcaaaatgaggccacacatttaaagcccctcctcctgattcttttctctgccttggctgcctcctgtggcattttaggtgctgagaaatgaaaacagtagggaaaatagttccaggatcctcatgttaatttgccagaaatggcatcttcaagtcgtcagagggatctgagagttccttcctggcctgacttgagaaaatccgtctgtccccagctctgcgtctgcctccactgcccagtcacctcctctccatgctcttggggctgggccctaccccaccatgcagtgctgccctggagcagtgagcttggtgggtcctgtctggcatgagagctgcctttgggagctggatcccagcctctaccactgggtctggtgcctagcaggctatggataaacttctgctgactccggcctctcctaagccactgcaacgtggtcggtgtagtgcacagtgtgtgtgcagcgtggccttactcacagcctccacattagagagaatctgactgaagtcttactgctgcctcgtgtgaacataaatgtttgccagaaccatgagcaggaaatgttaatctgccttgtttcctgtcctttacacggaagaatttttttctgtatggaatgcgtgccttacaaataatgagtggaaatacccatcgctaatgaaaagttatacttgactgttagtcagctaaataatctgagatttctaatacttttaatttggcttttacaatgcaatttatcttagcttttttgatttcttaggtcatatctttagaactatatatttgaatgttaatgtaattttcatattgaaattaaaatgttgaactgcgatgttaagtgtttcctgtggaaaaacgttcacattttctctagttttaaagttgaatcaagctgtttgaagattttcacatttcttctagattttatcagcttgttactttatctgtcactttctgtgatttgcagctggagggggttcctcatgcagccctgtcctttcaagaaaacaaaaaggtgattatttcagaaatcagagtcttgtgttgaatcttactgattttcttgtatttctgtaatgtaatgtatcttgtatttcttgtaatactgtattggactctgtgtatatctcttctcagatgagtgattatatgtgtgaatgttgctggaatctgataaccaggcctgaatagttttgtagggtggcttttaaaaattactttcatatcagaattgctttgtcataaattttgaacgcatcataaatttctaatgttcggggtcagcagactttttttgtaaagggacagagtgtaaacatcttagctttatgggccatatggtctcttttgcaacattcagctctgccctgtgacaggaatgcagttgtaaagacatgagctactggccagctatgttccagtagaactttacttacagaaacagacaggctgtagtttgccaatacctgccttagggaatgtgttgttatattttgtgagttaccttctcagtaaattttatttagtattagtcaggaatattattaagtagcttcttttccagcctggtcaacatagtgagacccggtctctaccaaaacaaaacaaaacaaaaaaacagccacgcatgtggcatgtgcctgtagcctcagctgctgctcagggggctgaggcaagaggattgtttgagcccaggagtttgaggtcacagtgagctgtagtcatgccactgcactccagcctaggcaacagaatgagaccttgtgtcttaaaaaaaaaaagtttcctttgttgggttattttaatttggacctggttatcatttttcagccatatttaactttgtacatatcagaatgttctgataaaacttaacttttattaaagtgtttgtgatataatctgctagttttggtacacattatcttttgcaatgccagttattttcttttccagtgtgggtttgcataggaaaagaattgctgtcactttctattttgaaatcttaaaagactgatccttttttgtgtcatgatttgagtatttaattgagagcctaatgcctaatattatttgcagtattaaatgggatcttaacaggaatagcattctagccttcattgaattaagtaaacatttcttaagagaacttggaatctataatatttgcgtcatcatagtatgagatacttaatcaagtttgagattttagtgaaacattgtttagaagccaaaaggattctaggaaaaattaatgtctatattcttgaattaggagagattttgggacgtgtgactaagttacgctgacacttgtttgtttcttagtcgctttttccagtggcggtgagaacgaagatgactgattcacattgctcagatgagtttatcctcttctggctgggacatgggatatatcctgtctcttttaagcctttttggtatttttcccccattgagagctgtgtcttcaaactcttctgttatagctggaaaatcctttttaagtgaaatctgcccaaattataagacagatgaaggtagagttgtgttggatataggattagggtgaaagtagtgggggtgtcctggagcctctcttctggtggcagcctagctcttgtgcctttgaggaaattaccctggggacggctctgtggaacatatttgcaaaccactgatttggaagatagagatggcttttgttaagatctgaattcacctttttggcattttatttgatttctcaaggtaaagaacttattttgtaataaagtttcctattatttagtagataggccaagttgctgtgttaattccatgtagattttgggtttcctttgctcattttttcactcttaatctcacatcattgtaagtttatggaagttatcatacttctgactttttctttgaagagcagaaattagaaattcccaataattattttgatagtgtcatttaatgacactcacatgtgatgtagccacaaagatttaatgagttcagttttaaatcatattaagactgttggtttcatttgttctcattaatgtaattctgaagatgaacaataaaatgtatttttagaactttcaaatgaaatattatttcatccttccagatcatataatgcttaagttctgattgttaatcataaagtctagaaaattaaaagataataaaatgaaagtgacttttaggtattagagttttattataaattctggtgtgtcattggagctatgacatgaatatttcaaaggccaatagcattggatctttacagttataacttaccatttttaagtttaagtagtaatatagattatttaataatcaaaatcaataaatattaattattaaaatgttttgtggtatagtttgagaatcattgcttttaactttttccatataggtttattgactttaatagcattctaaacataacatctctacattctttgtgtttaatactgtggaggtataaaaatacttatatatgatgataaactatattagagtaaattaaatattcttatgagtttcattttagagtgcatttacttaattttgaagtccttatttttagcaaactaaaaggaatgttggtacattatttactaggcaaagtgctcttaggagaagaagaagccttggaggatgactctgaatcgagatcggatgtcagcagctctgccttaacaggtagttctcactagttagccgctggtgtggaccttcactgtctgccttccaccccttgcccttcctgctcgtccccctgcacctggtggacagcacgactgggggcagcagtggagccaggttgcttaaatggggcatattcgggcttcttttataatacttactctgaagcttgtgtgtctgtggtgtttgcatcatatatttgttgttttccatggtttaggctgttttaaaattaggtttatggcttgagcatagggctttgtgagtaggggatggcaggtcgaaacatctcatgagttggatgggttatgctgggggttgggaaatgggatgaaaaattatgggatgaaaaattgcctatggatagtttaacttgaaagaatctgcctttgtttacagatagttatcttttttcttttttgagatagagtctcacactgtcacccagtgcagatacccagtgtcactggagtgcagtggtgtgctcttggtgcactgcagcctccgccttctgggttccagcgattctcctgcctcagcctcccaagtagctgggactacaggtgcccgccaccacgcttggctaatttttgtatttttttgtggagacgggtttttgccatgttggtcaggctggtcttgaactcctgacctcaagtgatctgcctgcctcagcctcccacagtgccgggattacaggagtgagccactgtgcccggccagttacagatacttatctaatgaaattctctgtgtactttataaaagatgaggattaactgaaggtactaataactggattatatgagggtggttttggttgtataatcctatctaaaagaatattttagctataactgaaagtaagacttaaatatttagagaggaaaatctgaataattctagtagtaattatttatttacaaaataaaaatagatttttttttgattacacaaattaaacaacaataaaacatcacagcaatccggatactataaagctcacatgcttaccgacccaactgccccaggagtgaccactgccaacagcttcatgtcgacctttttgccataatttttatatagccttttttgtttttaaatggtaatttagaaagtcaactaggaaaatgtgttacaggtttatcttccaggagaataggactggagtcgagatcttgaatgtggcttggaagaaggcaagcccaccccagagagatgagttgacagttgtttctgaccactgcttgcttagagggcctgcgtgtctgtgaccgcctagctttgcgcccctgactaggctgccccttaattacaaatgtctttatatattgctccagctaaggcttggagtagtcggttaagaacttgaacttcggtttttgcagtgaaacagcatttgagaatatcaccttctgataagccttattttataaggtgggtactgtagtgggaggcagtgtgagagatgcttgaaggatgcactgctgtcctgcatttcagcatcttcaggatgctgtgcagctgaaacatttgataacggtggaactgttcgttattttgcaagcctgtgattccctattgaatgttttctctcgccatttgacaaatgagtgtttctctgtcttcagcctcagtgaaggatgagatcagtggagagctggctgcttcttcaggggtttccactccagggtcagcaggtcatgacatcatcacagaacagccacggtcacagcacacactgcaggcggactcagtggatctggccagctgtgacttgacaagctctgccactgatggggatgaggaggatatcttgagccacagctccagccaggtcagcgccgtcccatctgaccctgccatggacctgaatgatgggacccaggcctcgtcgcccatcagcgacagctcccagaccaccaccgaagggcctgattcagctgttaccccttcagacagttctgaaattgtaagtgggcagaggggcctgacatctttttttttattttttatttgagacagagtctcactccatagtgcagtggaggccgggcacaggggctcatgcctgtaatcccagcactttgggagactgaggcaggcggatcacttgaggtcaggagttcgagaccagcctggccaacatggtgaaaccctgtctctactaaaaatacaaaaattagttgggcgtggtggcacatgtctgtagtcccagctgttagggaggctgaggcaggagaattgcttgagcctgggaggcagaggttgcaatgagccgagatcgtgacactgcactccagcccgggcaacagagcaagactccatttcaaaaaaaataaaaaaataaagtgcagtggctcgttctcagcccactgcaacttctgcctcccaggctcgagcgattctcccgcctcagcctcctgagtaggtgggattacaggtgggcaccaccacactcagctaatgtttgtattttcagtagagacagggtttcaccatgttggccaggctggtctcaaactcctgaccttagatgatccacccaccttggcctcctaaagtattgggattatagttgtgagccaccatgcccggccctgccacctgccatcttttgagttcttccctggagacctagacctgaaccctcctgcttgttctcttgttatctaatacccctattgacagcgcagcttagatcattaatggagagcttgacctcatctgataccttcactgaaggaaacaacttagtgtcttttgtgttgaacactgaggtaaaaaattggaatagttgattatatgaactctgctaaaattgagtgcattttacattttttaaggccttgttgggccctggttaaataattatttttaaaaatccttaaggagcctattataaacagatctgtggtcttaatgaaatgtgattaatactgtgcattattttaagaacttttgacttttcaaaaaacttttacaacatttcccatttgatagcggcataggtttaagcacttctcatctctaagttagtggacaaaaaaccctcatggatagtctaataatgtttgctacaagtccatgttgagttttatactccattttattttcagttttaaaaactgtggttaaatatgtgtaacataaaatttatgttcttaaccattttttgcgtatacagttcgctggtattaaatacatttaaataatgtcatggaatcattgctaccacccatctctgtaaccttttgatcatgtaacactgaagctctgttcccattgaactctattcctcctttcccgccaagtccctggcaaccacgattcttctttctgtcttctgaatttgactactttgggttctcatatactttaggagtcacacagtatttgttttacttagcataatgtccccaaagctcatgcatgttgtagcctatgttagaacttcctaatgtttcaggccaaatactattccattgtatggataggccacattttgcttttccattcctctgtccatggacacttgtattgcttcatgttttagccattgtgaatcatgctgttatgaacgtgggtgtacagatagctcctggagactctgctttccatttttttggctaaatacccagaaatggagttgcttttacattccaattttaatttaaaacattcatatcattgagtgttttacttaatagtatagtagttaacaaacttaataaaatagtattttggtaataatttgctggtagtccattgttcagtttttttaggtaaattacacaggacatttcaagtggacatgaaacatcttgtgatgtggaatcatgccccaagctgatggctaaacatatgaaataccataccctaaatttagtagatttagtctttgcaatttaggagataacctgttatattgttaggtttttgtcgaaaagctttgtcctcatatttccaacttgctgtaaaatttgtttgtgaagacaaatatttttgtatgggttttttctttttcatattaaaaagaaatgtccacattggaatttttttggagtttttagagctaatagagcttttcataatgtagtgggaatgagtgatcagtaagctcttagcagtttccatgcgtgcatttctgtgccttgaaataaatgacagatgagtacatttgtgttctgtgtgtaaaatgtgctctttcctcattgcacttccatgttggagggcttgtctcttggtgatcacacttcaaaattctcacagccccccttgaaccgtttaggtgttagacggtaccgacaaccagtatttgggcctgcagattggacagccccaggatgaagatgaggaagccacaggtattcttcctgatgaagcctcggaggccttcaggaactcttccatgggtatgtggactacaggtgatgcgctacaaagtggtttgtattcagacctggacatcttaattatatctttgcttccaagaagaagtcctttgatactgttttctgagttctgaatagctgatgaaaatgaccaattgaggaataatcatactttttcttgatctaaatcttatacttttgagttatcttagcataaatgtataattgtattttaagtggaaatttgtcacttaatcttgatttctctgtttttaaagcccttcaacaggcacatttattgaaaaacatgagtcactgcaggcagccttctgacagcagtgttgataaatttgtgttgagagatgaagctactgaaccgggtgatcaagaaaacaaggtgagggacataggcttgagacgacttggtgtttctgagcttgtgtgaggatttaaaatcgccctggctactgtctactttattgctttcccatccctgggcctttaaatttcccctttaaataccagctcttcccaggcctgttgttttctgcctttccaggtactacccacagccttgagaattgcctgagttctgcctcctttgagagtgtgccccagacaaatctattctgtactgaatgtttccttgtctgatttcttggatcattcatttgatggttgcgtatggcctgcaacgtttcttgttttggttctactgaactgttctaaaagtctctcttcatattatctttttacatgtaaatgtaactgtcttcacttttaattcctcaaggacaaggaatagcgtttcacagttcgtcccatcaatcagaattatagcctttggcatctccctatctaccaggcccacttcctcttagatttgggcttccccaggctgttgcctttccccaagtagcttctgcttgtcctgtagaagacctttcatgctttgcttctgcagcagccgttcctgaatgcctagtgtcaactgccttcttaccacgcccaccctccctgcatgctgcatttatcccctgccacagccctgtgaccctgtgtcctgctgcctctgacttgtctgtttctgcttggccatggtctctgtgaggtcaggtgtgcatatgggcacaaaccagggcatctctttatccccagcacctggcttaagtgctgctctggaactatctgttgaatgaactaatgcatgaatgtattgttgagtatgagacaaacaagtgtcattgtctcctttctagccttgccgcatcaaaggtgacattggacagtccactgatgatgactctgcacctcttgtccattgtgtccgccttttatctgcttcgtttttgctaacagggggaaaaaatggtgagtacaaaaggggatgtgcacagttgaaggaaataactaggtttcagaggtcagcttggtggcctgtttttgccttgcgtgcagcagaggaagtagaatctgaggatgagtttggttttcactagccgaggggagggaggaaatgatgggagcaggtaggttattgggtctggttttgttcatttgaaaacaatctgttgtttgaggctgaaggtggcttgggtgatttcttggcagtgctggttccggacagggatgtgagggtcagcgtgaaggccctggccctcagctgtgtgggagcagctgtggccctccacccggaatctttcttcagcaaactctataaagttcctcttgacaccacggaataccctggtatgttaaaagttcacatcttattttctcagatttaatcattattgtaaaaactatttcagtattgactattttagttttagagcagtaagtgttttgagttcatttgggatatttgacctgcgttgtagctcttcagaaaacacatgaatagtgaagttctttgtttcatgggttccctttagatgaaacccatagaggagaaaagtagaaacctcagcacgtaagagccaacatatatacacatcggatttaaacctaaagcacaaattgtgcctggtcgcagtggcgctgagtcgcactcagccaggccaggcattcacactcagggtgagtgggaaccaggactggctgaggcagcagtggacccaagtctccatcgcgcccatgcttactatggagccttctcgttctctctttttctttgggtgagagggtacacttgtgtttttgaatttatatgaggtaagtgtgtaatagggttttttctaatcttttttaagtggaatctggaattttaatcagatttattatctgacaacctagaattataatccagaaagtctgtggtattgaggacatattggcaatatgatgaatctctaattcttaaatcctgaaacttttttttttttaatcacttagggttattatagtgaagtcatttctgaatttggatcttctcttcacacctctttttctctttcctgagaattaagcttttgtttcgagttagaaagttgatagtagggaattgttccatggctgagcaatttatctccacagaggaacagtatgtctcagacatcttgaactacatcgatcatggagacccacaggttcgaggagccactgccattctctgtgggaccctcatctgctccatcctcagcaggtcccgcttccacgtgggagattggatgggcaccattagaaccctcacaggtaacggccagtttttcagctgtgttttttctagttatgcttactaaggtttaagtttagatgatgatgtttgttgcttgttcttctggttaggaaatacattttctttggcggattgcattcctttgctgcggaaaacactgaaggatgagtcttctgttacttgcaagttagcttgtacagctgtgagggtgagcataatcttctgtggaaccatttcttcacttagtggacattttatcattgctacaattaaaattggagcttaataggaaatatttccatgcactctaaagctgtaaccagtaatacccaccatgtatccatctctcagctttagaaagaaaacgttgccagtaaagttaatgcttcataaacttcagtttaagttctaattctcagaatatttgtttgaaatagacctcttcctaaaggatatatttagaaataacctatcattaagtgtaaagtctgttgaatatgctgggcacggtgactcacacctgtaatctgaccactttgggaggccaaggtggaaggattgcttgagcccaggagttcaagactatgggcaacatagttgaccctgtccctacagaaaattaaaaaaaaaaaaaaaaaaagtagctgggtatggtggtgcatacctgtagtctcagctactcgggaagctgaggtggaggggggattgcttgagccccagagatcaaggctgcagtaaggcgtggttacaccactgccctctagcctgggcaacagagtgagactgtctcaaaaataatagtaataataatcagttgaattaaaaaaaaaaaaaaaaaaaccactgtgctaggcccatagtatggtaagagttaaagtgagccttagggattatttactcaacctctgtttctgtataaagtggaataggctcaattctttaagtgatagcatgttgaacctttccataccaactggctcataagtcacaactggccagtcaacaagagtaaaaattaactggtaaaaatcaaagcaaaaaacctacaattgtcaaatttgtgggataactcccccttttaaaatgtcatgcctgacagtaatttctctctagtttccaggttttcagtcagttgtgtcttttttgagcagaaggaagcatgctaagagctcaatcttgtggctagctgggggtctttgtgtcagccatgcatgtgatggtgcccctgggtgcttggggctgcaggggaggggtacagcagtaggggcctgttctgttctctcgtgctgtggagtacatagtgacatagtggggtggtccttggtgtaggtcccttgttcctacccctgggtctgagatttatttagaagtggtgttggggctgtgcggcaggcccctctgtaactgatcaatgtttgtgaagttgctgtttgagagttgaaaccatgacataagcagaaatggaaggaagaaagaaccagttatgtgaaagggacacatttacttttaagcttgtatttactgagataaagtattcttaatcaatgttcttgagaggtgtgggaaaaatgcaacatcctggttgcagttaaacccagaacattgtgtgttgaagagtgacggttctcaaaccgtcaagacgcgggtactgagtgggactaacctgctgtcctcttgccttggaccttgtgttccagaactgtgtcatgagtctctgcagcagcagctacagtgagttaggactgcagctgatcatcgatgtgctgactctgaggaacagttcctattggctggtgaggacagagcttctggaaacccttgcagagattgacttcaggtaagtgagtcacatccattagatttcatgaactaagctcaattgaaagttctgggatcacttgatgcaaggaatgatgttatcaagtaccctgtccatcagaaatccgagtggtttaggtagatgacagtgattttctcctcccagtggctttttgctgaactttgccctatgcttggaattttattttattttattatttatttagagacaagatcttgctctgtcgcccaggcttgaatgcagtagcacaatcatagctcactgaagctttgaactctaggactcaagtggtcctcctgcctcagcctcccgattagctaggagaataggtgtgtgccgtcacactggctaatattttttgtagaaatggggtcttgctatgttgcccaggctggtctcaaactcctgggcttgattgatcctccatcttggcctcccaaagtgctgggattacaggcatgagccactgtgcctggcctagaattttaaaatataagtagaagagtagatttttttttttggtagtcctcgtcatttaagtattctggatagtgggaataaaagagcttagaatttttcatctttgtcttaaacttttaaaaaaatgtagcttatattaattctgcttgtttaaaaagaatatactcttcattatactgaacctaggtaagacagctggtttatattttgttgcaattaaaaaacgtgagctgtggttgcagtgagccaagattgtggccattgcacttcagcctggcaacagagtgagacttggcctcaaaaaaaaaaaaataacatgagctgtgttggcactttcattttctaagagtagttttggctggagaagttttctttcagtactttcttttagaagggaaattttcctttataatttagggtttgttttttttttttccaagccaccttttatagagcccttgtgggttatttcatttaatccttagaatgtttataaatctgggcttgttctcggctccacccacagatagggacgctgagcgtgcatgagtgggcagcaagatagcaggttatggagggcccagctcaccccttctgtggcttgagccaattttatagggcacttacagagtcttttgaaatagtatttattttgaagaaaaagaaaaacagtttactgagtactgtcttattgagtctggaattgtgagaggaatgccacctctatttatttaaagccattggccttttttgttgttttgagtaagtgctgcccaaggtccttccagggcacctggatgagcctgctctggagcaagctggcggtaagtgtttactgagtaactaaatgatttcattgttaaatgtgctcttttgttaggctggtgagctttttggaggcaaaagcagaaaacttacacagaggggctcatcattatacaggggtaagcggtttatttttgtgagatgctgttttaccttcaagaaggtgaaagtgaggctttccttgtggaatttctctaaatgcattcgtcatgttttagatgtttatttcacagtttatatcatgaaagttataatcttgtcatatggatttaagtctagtaatgttgagttctttctcactagctttccaaaatatcttacctaaaatttagtcaaatacaagattatgtttatttttattatccttctctctaaagcttttaaaactgcaagaacgagtgctcaataatgttgtcatccatttgcttggagatgaagaccccagggtgcgacatgttgccgcagcatcactaattaggtatttaccaatattttatctcttttccttttttggttgaagtactaaaagatacgagaatggaaagagagggaagaattcaaaggatgtagagcagtattcctgaatctgagctcatttcagccattctattcttaaactataatgaaaaaaaaatccaaaaaagtctaaaattataattaaaaaaacaacaaaatactaactgtccattgtaaaaagtaatgcactttcattgtaaaaattttggactatagagaatagtactaagaagaaaaaaaaaatcaccttcaattctgctgccacctggaggtaatcactgttaatattttgctatatactctatgagtttcttgttcaaaatcaggtcaaaattacatgcaattttgtaatctgacaatttccacttaatattttattagcattttcctgttatgaaacagtaattttagttatgggtcgttgttttgctatgcggttgggataaaattttatatactttttttggcaattacttattatacataaatgtttgtgtatagttttctttttctgagaattcctggaagttgagttaccaggcccggctttgaatttttttttttattttttttttgagacagagtcctgctctattgtccaggtgctatctcggctcactgcaacctctgtctccctggttcaagcgattctcctgcctcagcctcccgagtagctgggattacaggggcacaccaccacgcccaattaatttttgtatttttagtagagacagggtttcacgatattggccaggctggtctcgaacttctgaccccgtgatccacctgcattggcctcccaaagtgctgggattacaggcgtgagccatggcgcctggccaggctttaaatttaaaacaaatcttctaatagctttatggaggttataatttacatttcttgaaatgtactcactttgagtgtatagtaaactccaattttatcacatttctgtcaccccaaatgtatccttgtgcccatttgctgtaacctccggttcctgccccaactcctaggcagccactcatctattttctgtcccttaagatttgtgttttcgccaggcgctcatgcctgtaatcccagcactttgggaggccgaggttggtggatcacttgaggtcaggagttcgagaccagcctggccaacatggtgaaaccttgtctctactaaaaatacaaaaattagtcggatgtggtggcacacgcctgtaatcccagctactcgggaggctgaggcaggagaatcacttgaacctgggaggcggaggttgcagtgagcagagatcgcgccactgccttccaacctgggcaacagagagagactgtctcaaaacaaacaaagatttgtattttctggacattttatagtactggggtcatagtatagatggacttttgcatttggcttcttttacttaattgtgagattggttcttgttgtagcatgtatcagtagtttgttcatttttattggcgaaagtattctattatatgaataataccatattttatctatccatcagatggatattatagagttcatgttttggctaatttatgaattatggtactgtgaacatttgcctgcaagattttgtgtagacatgtcttcatttctcttgagtagatcacctagaagtggatttttaaataattttggtacttactgtgaaactgctcttcaaaaacataccattgttccttccttccttccttccttccttccttccttctttccttcctcccttcctccctcccttccctacttccctctccctttccctttcccttccccttttcccttccccttcccgcctgcctgcctgcctgccttccttccttccttccttcgtttctttctacatatacacatttttttaaatttcaatggtttttggggtacaagtggtttttggttacatggctgaattttggttacatggtgaagtctgagattttagtacacctgtcacccgagtagtgtaccttgtacccaatatgtagttttttgtccctcaccttccagccttccgccttgtgagtctccaatgtccattataccacactgtatgcccttgcgtacccacagctcagctcccacttctgagaacatatagcagaaacatgccaaagtatactcccactaccagaatgtgattgtgcctgattcttctcaccagtacaaatatttcaaaaaaagttaaatatgtatcagttttttgggcagaagttgatacttctctttatttatttattttttttgagatagggtctcattctatgatgcccaggctggagtgtggtggtgcgatctcggctcactgcagtctctgcctcccaggttcaagtgattcccacgtcagcctcccaggaagctggaattacaggcgagggccaccactgccagctaatttttgtattttttggtagagatggggtttcaccatgttggccagactggtctcaagctcctgacctcaagtgatccacctgccttggccttccaaagtgctgggattacaggcgtgagctaccacacccggctgatatttctttttaaaataacttaccttcttttgaaagtaatacatgtttaatgaacagaatttaaggaaaatataaaaaaacgaaataatctttgtaatcaaactactgaaaagaaaaccaaagttacattttggtgcatattctttttcattttcatcattgtaatttgcatttctttgattacttgtgagacactcctttcatttacttaataggtttatatgacttgcctattcagagattttgcagctttaccattttctgcaaatgatagcaacttctttttgtttgtttgtttgtggagacagagtctcgctctgtcactcaggcaggaatgcagtggtggaatcttggctcattgcaactattgcctcctgggttcaagcgattttcctgcctcagcctcccaagtagctgggattacaggagtgtgccaccatgcccggctaatttttgtatctttagtagagatggggttttgccatgttggccgggctgatcttgaactcctggcctcaagcggtccccctgtctcggcctcccaaagtgctgggattacaggcgtgagccaccgtacccagccagtagttacttcttatattctagaaaaaattctactcatgatcaagtctccatgaggaaagagactttaattgaagatcatggggcttgcagaccaatatgataaaatagttcattgtttctaaaagtattactgagtgttgatggcagatatgaacccttttgtttttgtaggaaaatgttacccgtattctccatttgaattcagtttagatttgttaggaatcgcagcttaagctttgccatctgggagtgtttgggacagttttgcagacaaaattgcaaaagtgcctaaggaatgcagctggcattcagacctgctctgtgctcagtactctgtggacagacactgttcagcacttgttgatcagaaggtttagaaagagaactttcaaagttggtttttaattaaagcatttaatagtgtaaatagaaagggattaaattttatgacagacaaaagaaagtacagcacccagctgggcgtgggggctcacgcctgtaatccagcactatggggggctgaggtgggtggatcacgaggtcaggagttcaagagttcaagaacagcctggccaaggtgatgaaaccctgtctctactaaaactacaaaaattagccgggcgcggtggcaggcgcctgtaatcccagctactcaggaggctgaggcaggagaatcacttgaacctggacggcagaggttgcagtgagccaagattgcaccattgtactccggcctgggccacagagtgacattctgtctcaaaaaaaaaaaaaaaagaaaaaaagaaagtacagcacccagttatgtccgagtgggtgcatgagagtgaccctgagattggagacaacgctgtcacgtgcttgaagaacgccacctgagaaagggggcgagaagtggtgtccgctggtaaccagaggtgttggcttagccatctgcagggaggagggtggtctatcacaggtgagtttcatctactttcttaagcaaattaaccttacttttgtgttaggcttgtcccaaagctgttttataaatgtgaccaaggacaagctgatccagtagtggccgtggcaagagatcaaagcagtgtttacctgaaacttctcatgcatgagacgcagcctccatctcatttctccgtcagcacaataaccaggtatgctgacccagtggcatcttcacattgtcgggaaaatgccctttcctgatgcctttctttaggctttaattgaaaacattttattttctagaaaaaagcttcagctcaggatgtttgagtgtaggtcagtcctttgataggatattatcattttgaggattgaccacaccacctctgtatttaagctctgccacaatcactcagctgtgacactgtaaatctcttaatagtttattacattccatgtgctgacagttgtatttttgtttgtgacacttacgtattatctgttaaaacattttcactttagttgtgttacctttaaagaggattgtattctatcatgcctgttgattttttggtgagcgggctattaaagtcagtgttatttagggttatccactagttcagtgatttgcgagattatcattcacatttattgtggagcttttgaatatcgtgtcaaatggccacatatatcccattcttatctgcttcttaggtgagtgggacacagtgctttaatgaagctataatcttcagaattctagcttgcagagaagattgcagaagtgataagacttgtgctttttaattttgtcttttaaatgttattttaaaaattggctttatatgatactctttttttctgctgagtaacagtgttttacaaaacttggactaaatgacttctaagcttaaatgatcacttgatgctttttttctgaattaggaactcagcttatcaaatatcaaagtcataattcctgaataaataacgtcttttttcatgtaaagactgctttaaaaaacacatggaaggctgggtgcggtggctcacgcctgtaatcctaacactttgggaggcccaggtgggcaggtcgcttgagctcaggggttcaagaccacccagggcaacatggcaaaacccacctctactcaaatacaaaaaattagccaggcgtggtggcgggcccctgtaatcccagctactcgggaggctgagggatgagaatcacttgagccccggaggcagaggttgcagtgagccaagattgtgccattgcactcccagcttgggctacagagtgagactctgtctcaaaaaaagacacacacacaaacaaaaaaaacatggagacatttttttggccaccttaatatttcccctcagataatttcctttgtttaaactcagaactggcattttctctcttggagaagattcaggacaaatactcctttaagataagtagaagcagtgaaagaggatttgattatcaggaatttgataagcttagaataaattgttgcttcttaatgtcatttcagaagatgaatatttattaatagatgccaactgagatatcattaaaattgattactaactactacttggaaaagtctcccagttccaaacttcagcaggcctcttgacaattcagctgtggtcaattgggtcttgcgtgatagatacaatgaccaattgtgcagcagagtgtgctgcttagctgcctattctgttagcattcatgtgttaacttaaaatcataatctccttagttttgttgagtgtctccgtggacaagacactgtgagggatacaaaatcagattggctttattcaaaccactggggtattataattcatttataatttattttattttttgccttttttccatgtgttctaaaggaattagagtttgtatataactataatgggggatagaaattgacatgtgccatgaagggaatgcaaaaaagtgccgtgggagatgagaagtggagaaaggaatttcttttttcttggaagcaggaataacttcatgaagcatgtatttcaacttaaacagatagtaggcaacgctgtaaggggagtatggctgcagcaaaagtgttcggggcagactgggaggaagggagggaataaattcagccattgttatggaataatgatcaaaatttattttcagcccgtttcacttaaaagttgagactgcttaactttttttaatctttaatcttaaacttttaaatgccatttgatctttaaaaatatatgttttaatagtgtattttaagtctctatatttttgttattagaatatatagaggctataacctactaccaagcataacagacgtcactatggaaaataacctttcaagagttattgcagcagtttctcatgaactaatcacatcaaccaccagagcactcacagtaagtctctttcttgatcggtcttactgacattgtaatagtttttggtagcttgtatggccagttagttgtatggtcatcttacggtgaggtgcttgtcttacagctcttacttatccatgaggcttgctaagaaattgtgcttctgtgaaaagaatctcagcttactccaggaatgtaaatgactatgttttttctgattattaaagtaatacacgcccaaaataaaaaaattcagccaatttaggaagacacaacaattaaaataagccaggcatggtggctcatgcctgtaatcccagcactttgggaggccaaggttgggggctcacttgaggtcaggagtcggataccagcctggccaacgtggtgaaaccccatctctactaaaaatacaaaaattagctgggcgtggtggcgggcgcctgtaatcccagctactcaggaggctgaggcaggagaatcgcttgaacctgggaggtagaggttgcagtgagctgaggtcaagccactgcactccagcctgtgcaatagagcgagactctgtctcaaaaaaaaaaaaaaaaaaagaaaagaaaaaagtaaactactgtcacctgcattggtaatgtatcagaagtttaaaatgtctagattataattaactcagtgacctggtaatatatactaagggaaaaatatttataatttacatttttacatttttatttttttaattttattattttttttttgagacagagttttgctcttgttgcccaggctggagtgcaatggcatgatctcagctcaccacaacctccacctcccgggttcaagcaattctcctgcctcagcctcctgagtagctgggattacaggcatgcaccaccatgcccggctaattttgtatttttagtagagacagggtttctccatgttggtcaggctggtctcaaactcccaacctcaggtgatccgccctcctcgaccccccaaagtgctgggattacaggtgtgagccaccatgcctggccttacatttttataataagaatttatgttgctgacattagaaaagaaccataatatccaagaatccaagaataattaaattatgtacatatgctagtatatagtgtgatgctttggagaatttttaacaatatggagatgtataatctggattgtaatattgagtgaaaaaaggcagaatacaaacctggtgggggtatagtcggatttcagttaagaaaaataatatttacatatatacatttctcacactggcagataatcaccaagataaattttgggattgtggatgatttttttcttctttatatttttcagatattctcaaattttctaaaatgagcaagtataacttttgttatcagaaaaaaataatatacaaaagtaatgttaatttgctggtgaccaggttaaacctttttatttttattttttgagatggaatctcactctgttgcccaggctagagcacagtggcatgatcttggctcactgcagcctccgcttcctgggttcaaatgattctctggccccagcctcctgagtggctggaattacaggcgtgtggcaccacacctggctaatttttgtatttttagtagaggtagggtttcaccaggttggtcaggctggtctcgaactcctgacctcgtgatccacccacctcggcctcccaaagtgctgggattacaggcgtgagctactgcgcccagccagacctttttattttatttgacaaaagaaatacttccatgttatagaagactaaatattgtttgggctgtctgcagtatggtcttcccttgatttgttcaaaatatcgtaaactttgcttatttatttttattgtggccgactgtgtcgggcactgttgtaggcttgggatggaaaaacaggattcctgcccttagggtttctgcaggctggtcagggagacgatgtggtaagctggagctcagctcctaaggatgtgcaggggcagttgagaggcggaagggtgggagatcattccagggtgtgggcagcacaggaacctctcttcattgggatataattgccattctgataacacgtgtttgaggtgtctaaagtaggaagttgtaccatggtgggacagatatcctgtggttatcatacacagatctcagttttcttctcattgtttgtactttttataaagggtaacaggagatataattcaataaacctttgtggtgtttgggtgtgattttattgtttctttcttctcagtttggatgctgtgaagctttgtgtcttctttccactgccttcccagtttgcatttggagtttaggttggcactgtgggtatgtattttcctcagtatatattaatagttgtctacaacagtatgacataaacatagttattaggatgccctttttctttctttttaagtcttttatcaatttggctttttggaaaaatatctgatggaatacttgtttctgctatattagctgtgtgagactagtgacaggagctgtgggaaatgaatgccaaatgttcttaggcattgatgggaatttcagggtgtggtcttcaagttcatttaagggaattttcatatgctggcaaaaggcttttctcattagcttgactctttccaaaattatttgctgtgaattagaagtttaggaaccttttttcacttaattgtgacctagcatacgaaatggtgatgatttaggaactactgttcttgtattaacagcttttatttaaaaatgattttcctccagtagatggccctactagcatctgggaaataatttcaagtcttctccagcattcaggaataggctttcattttgtgtatcaattactgagaatgattttggtgactcacatcacatttgagaagtaaacctgcagatttcttgtgtgtgtcagcaaatgaccaactgatatttgcttgaagtggattacattatctgctctagaatgattgctttcccaccttcctcacatacagactgagcagctacggtttctaatcataggtctggcactagacttcacttctgggcaactttggcattggagtaaaatgtattaatttaaagaaagttaaaaatccgttcaagtaaacatacagttctaatactttttacaatttaaaatatagatttaaatgataaaataaaaaagaaaatatgggtagacaccataatcctcgtttctgcatctgttcacaaggggttgatatttatgagttctattctccatatccattctatgttctcttaatgctcagtcagcacctcaggtggttggagttcaatgcttggtagtttgacttacactgtcttttctaggggattgagccctgggtagtcctgcttatttgaggttgcaatttgtctttcaataacttttactacaagatatggcgtgttaaaggataccattggggaaccaacataataatatcaggaaaactaaccacgtcagacctgccccattgtgtatcaagtacactatttttccatagtaataaagagttcaccccagccaattctcttttattttgtgcctgtttactcaatggcattaacatgcccaaatgtctgggtagctgtctcatctccagttcagcagaaccattgtcatatgccctagtaaaagcattccttcattggacacttaggccccaatactttcattcagatctactacctgatttcatttctcaaatgatttttatggagctctgatttataggaaagatgttagttgattaaaaataaaacaatttctgagctggtataaaatgtattgtgacatgccttcctcttggaattgcaagagaaaggaagactgttgtttgcttaaaaattgtctataatttgactttgcaaatgtctgcttccagagtgcctccactgagtgcctcagatgagtctaggaagagctgtaccgttgggatggccacaatgattctgaccctgctctcgtcagcttggttcccattggatctctcagcccatcaagatgctttgattttggccggaaacttgcttgcaggtactggtactgagttgaaacagggactccaggacttggattttgatttccttagggggaatgggggtggtgagcatatgaggggaaaatactataaggtcattgccagtgatggcttgtccctttagtcaaatttcagatgttacctatatgcataaacacatgcagttggcagctgttctgtgctgagtattttaaagtagcctcttcccaatatagcccctcagttaactacaagtaaactcattttgaatttcattttaatgggcaccatatgccagtactccctcgggcactgggatgttaagaaagtataatgtatggacttcattctcaagttagttttagattagagggggatacacgtaaacaaaagtgcagtggtcacacagagtggccctaatcactctccttgggcagatttatgggctggtaggaaagagcacaacacggagagggtgtagcaccttggcgatgataatggaggatgtggccagcaaggaagacggagtccattgaaattgattttgggagaagttgccaatctccatgaaagaattggggcctgtgctatttgcttcagggggctataggagagtttcgtgaaagggactaaaagatgagtattttaataagatcattcatccaacttgaacatgggctggaggagaaggtagggagactcaggagattaatgttgatgctaaggcaagataatggctttgggactgtagggaagacactgattgtaagagaatgaaggaggcagaattgccaggcctggttcaccaactgaacttcggttgtgaagacaaagaaacctgggatgacttcacatcctgggcaggtgtgtggtggtgacagtcatggaaattgggaacacagatttgtgcgggaaacatcagtttcagtttgagtttggcttatcagttgaatatcaggcacagatgtctggccaactctcaacatagggtcttaaatgacttcagttccccaagcaatttgtccttcccatgctattggggtggagaggtaatgtctgtgcccatatcacagccagtgctcccaaatctctgagaagttcatgggcctctgaagaagaagccaacccagcagccaccaagcaagaggaggtctggccagccctgggggaccgggccctggtgcccatggtggagcagctcttctctcacctgctgaaggtgattaacatttgtgcccacgtcctggatgacgtggctcctggacccgcaataaaggtaatgtcccacttgggtgctggattcatacagccttaatgactatgggtttccagactacctttgtttagtaatctgtcccttctttattctctttttgctttaaatgaacaaaattgctcagattgtgacactaaatttaacatcaaaatgtgaccatgtggatgggtgcagtggctcgtgcctgttattccagcactttgggagactgaggcaagtggatcacttgaggccaagagttcgagaccagcctgggcaacatcacgaaaccccctctctactaaaaatacaaaaaattagatgggttgggccgggcgtggtggctcaagcctgtaatcccagcactttgggaggccgaggtgggcggatcacgaggtcaagagatcaagaccatcctggctaacacagtgaaaccccgtctctactaaaaatacaaaaaaattatctgagcatggtggcgggcgcctgtagtcccagctgctcgggaggctgaggcaggagaatggcgtgaatccgggaggcggagcttgcagtgagccgagatcgtgccactgcactccagcctgggtgacagagcgagactccgtctcaaaaaaaaaattagatgggcatggtggtgcgtgcctgtaatcccagctacttgggaggctgaggcaagagagttgcttgaacctgggaggcggagtttgcagtaagccttgattgtgccgctgcactccagcctgggtgacagagtcagactctttccaaaagaagaaaaaaatgtgaccatgtgttttatagctcttttagtatcatcagtcactgttatccctaagagggaaatacctagctttagttttaggtttccagcattagccaagaaagctcagaattgatgttcctggccaagtacctcattgctgtctccttaaatcttggttaatggctactgtcctggctagcatagttatggagcatttccatggttgtagaatgttctgccaatctcagggacagttttgcttttctgtgaagcaataaaatcaacttcaaaacaaatgttaactatttgtacaatggatttaagatagaccagttcacatacttttttttttttttttttttgagatggagtttcattcttgttgcctgggctggagtgcaatggtgtgatctcagctcactgcaacttctgcctcctgggttcaaacgattcttctgcctcagcctctcgaggcagattacagctgggattacaggcatgcaccaccacacccagctaatttttttgtagttttagtagagacggggtttcaccatgttggtcaggttggtctcaaactcctgacctgaagtgatctatccgcttcggcctcccaaagtgttgggattacgggcatgagccaccacgcccagcctaagatagaccagttcacttactgtttatatctgattactctctctttgccttgtcttctacctttaaaaatctccctactaacttcccattctcctttagctgccatcagtcttctcccttctctgcaaacatctctggagagtcccagcctcagcccacagagcttcccactgctctgaggtggaccttgtttgcaaggcttctttggctctcttggcctggaccctgtctactacttcagccatccttccttaacccctgctggtggtttctgttgccacactccatagcagcgtttcccgcccagatcatgtctttacatctctgggcactgctctggtcctgcctgcctttccctctttgtatcctgcaggctgctacccccatcttgagtgtcctcttcagttggctttcagagggcctcctgggtgttcccttacccacttgccactccccagtcactgggttcagtccttcctgcccaccagcacatgctttctaggctctgtcctaggccgtcttctctctttgtagtctctgggccagtgctgttctagagagtggcagaattttctataaccatggcagtgctccatagctatgccaggcaagacagtagccactaaacacatatagctgttgagcccttgaaatgcagctagtgtgactgaagaactgaaccccgattcggtttaattttcattaaatttaaatttaaataaccttatgtgggtagtggctccagtattgggcagggcagcctgagagtcggggctgttctcctgtcttcagtgtctagatgagggacctcagaggacctgtctctggagctgcagttcaatgtagccagctgccccgtgacacttacatatagctgatttgtggatatgtcagacacggtgtgatgagctcagctttctgtcctcctccccacatctgcccctgccccatttaccccactttgtgtcttatcaagctagaaacaggtcaccacaagtcttcatttccactcaccaagtcttttgtttcccctactaaatattttgcgagaagaaagtgtgtacctttgtattcacatacatgtacatgcacatatacatgcacatatgcaggggtccccaacctctgttaaaaaccggactgcaggccgtgcgtggtggctcacgcctgtaattccagaactttgggaggccgagaccagtgcatcacaaggtcaggagatcgagaccattccggctcacacggtgaaaccccgtctctactaaaaatacaaaaaaaaattagccgggtgtggtggcgggcgcccatagtcccagctacctgggaggctgatgcaggagaacggcgtgaacctgggaggcggagcttgcagtgagccgagattgtgccattgcactccagcctgggcgacagagcgagactctgtctcaaaaacaaaacaaaacaaaaaaaaaaaaaaccaggctgcacaggaagaagtgagcaagcattaccatctgagctctatctcctctcaggccagtggtggcattagattctcataggagcgtgtatgagttcgttctcacacttctgtaaagacatacctgagacatataaagaaaagaggtttaattggctcacagttctgcaggctgtacaggcttctgtttctgggaaggcctcaggaaacttgcagtcatggcagaaggtgaaggggaagtaggcacatcttcacatggcccacaggaaaaagagagaaggagagagagagagagacagagagagagagagaaaaagaaagattgagagggagagaggagggagaaaggagagtgcctgtagggggagttgctacacaaaggagcaccagggggatggtgctcaaccattagaaactacccccatgatccaatcacctcccaccaggccccacctccgacactggagattacaattcagcatgagatttgggtggggacacagagccaaaccatatcagagcatgaaccctattgtgaactgcacatttgagggatctaggttgcatgctccttatgagaatctaatgcctgatgatgatttgaggtggaacagtttcatcccgaaaccatcccccgccaaccctggtttgtggaaaaattgtcttccacagaaccggtccctggtgccaaaaagtttggggacctctgcacatatgcatgcacctgtacatggacacataatacatgtacatatgcatactttatattctctgccacttctggtccagactgatatactatctcatttggattactgcactagccttttgttttggaaacagcattttttaaaaaatttaatttaatttttttgagatagggtgtcattctgttgcccagcttggagtgcagtgtcatgatcatagctcactgcggcctcgatctcccaggctcaagtgatccttctgcctcagccttctcagtagttgggactacaggcatacccaccatgcccagctaattttttgatttttttttttttttgagacagagtctcagcctgtcgcccaggctggagtgggttggcgcgatctcagctcactgcaacttctgcctcccaggttcaagtgattctcctgcctcagcctcccgagtagttgggattacaggcgcctgccaccacacccagctaactttttgtatttttagtagagacggggtttcaccatgttggccaggctggtctcgaacttgtgacctcgtgattagcccgcctcggcctcccaaagtgctgggattacaggcgtgagctaccgctcccagccaggaaacagcattcttgagataattcatataattcacccatttaaagtatataattcattctctttagtatgcccacagagttgtacagccatcaccagaatcagttttagaacccataaaggaactctgtactctttacccaaaacctccatgcctccagctgcaggcagccactaacctgccttctgtctctgtgactctacgtcttctggacattactgtggatgggctcatacagtcagtgagcttgtgactggtgccttctaccaagcagggttttcagtgtagcagcctctctgtttttcttttttttttaaattgtgacggaacttctgcctcccgggttcaagcgattctcctgcctcagcctcccgagtggctgggactacaggcccatgtcaccatgcctggctaattttttttttttttttttttagtagagatgggtttcaacatgttagccagggtggtctcgatctcctgacttcatgatccgcctgcctcggcctcccaaagtgctgggattacaggcgtgagccaccatgcccggctaacctttcatttactgtctgcatttcttccctgatgccttccagtccatgcacccgattgtagccattcatcctattatggtttaaggtgactgtcttagtcagcatgggttgccataacaaaataccatagcctgggtggcttcaacaacagaatttacttctcacacttctggaggttgggaagtccaagatccaggactttcgccttgccctcatgtggtgagggggtgaggaagctctgtggggcctcttatatatggatgctaatctcattcatgaggggtctgccctcatgacccagtcacctcccaaaggccccacctcctaataccatcaccctggtaattaagtttcagtgtataaatttgggggactatagacattgaaaccataacaagcacttttctaagatcagggagtgagtaagtagcagagctaggacctcaattccacatgtcagtcatcttgccttcactctgctccatgatggctgcctcctagagcattgggagtctcgatgttctatatgctctcatgtgttgtgtattggagatagttgaggctttatgaatacatctggatttgttgacttctagctttgctggtaaccagctgtgaccttgaataagttacttcatctctgagcctgtttcctcttttagaaacaggagtttaaaatgctgctttgggttgggcacggtggctcatgcctgtaattccagcactttgggaggctgagatgggaggatcactggagcttggagttcgagaccagcctgggcatcatagtgtgagatcctgtctcctcaagaaattaaaaaattagctgggtgatgtggcgtgtgcctgtggtcccatctactctggaggctgaggtgggaggattgcttgagcccaggaggttgaggctacaatgaaatatgattgcaccccatcctgggtgacgagtgagaccctgtctcaaaaaagaaaaaaaaaatgctgctttgtacccctttcatgtcatggcgtcatggccaacatagaatgccctggttgtttgctgttggagggcatgggcctgggggctccctgagggctccttccatcttcaactcattctctgtgcacctgttaggaagttgtgggccagtccctaccatgtatcattgtgtgggtaaaagtaaataaaatgtgtacagtgtctgaactgtacatatcagggtccaagaacaaaatgagtgacatgggttagctctttttaataaatggtaaaaccaaatattctaattttcagttttgttatacttccatcacatgtttttgtttttttgttttttgtttttgtttttctattttaggcagccttgccttctctaacaaaccccccttctctaagtcccatccgacgaaaggggaaggagaaagaaccaggagaacaagcatctgtaccgttgagtcccaagaaaggcagtgaggccagtgcaggtaggaaacagcgtggggaagggagggacatgagtgcagcatctgtcatgtagaaacataggatttaagtaacttggtgttttagagaaataaatataatacacatcagtaaagtgagagaaagtttctccaggtgcggttcaagatattagaaactaatgactgatgtacacagaccaccttttggtctgaagcatttctaagtgccactggctgacatgcagcccctacagcctccaggcttccagccctagcatggagcatcactctcctatgcttccctggttgcaggtgatggctggagaggcctcctgattttcagtaagggaagtggtgtagatgcttaggaatagatgtagtgagtgaaaaaactgattctgatatgtcaaaaattctgattggaaatggaatatttacatttggaagagctaaaggcgagagaaagtggggataaagtcatctgagttggaggagcttaaaccattcacaagtttggaggacctttttttacccatgaaaaggtcagaacagaaggggctaggatttaggtgtgactgcagtttattgaattcccatccatactgctctcggtgggcagtggcaggggcaggagaggagcctggcaaagcatgaagtgactgctgctgcctctgctatctgggacgcctggccacctgtctgtacagtctccctccagacccattctcacgctgtctcttggcacccaggggccagtgatggttctcccatttgttttgtgtatatagcatttatatcaaggctatttatttatttatttattttatttatttatttttttgagacagagtctcactctgtcacccaggctggagtgcagtggtgcaatctcggctcagtgcaagctctgcctcctgggttcaagcaattctcctgcctcagcctcctgagtagctgggactacaggtgtgcaccaccacacctggctaattttttgtattttttattagtggagacggggtttcaccttgttggccaggatggtcttgatctcctgacctcgtgatccgtccacctcagcctctcaaagtgctgggattacaggcatgagtcactgtacccggcctatttatttatttttaattgacaaaattgtatatatctgtaatatacaacatgatgtttgaaatatgtgtacattggccaggcgtggtggctcacacctgtaatcccagcactttgggaggctgaggtgggcggatcacgaggtcgggagttcaagaccaaactggccagcatggtgaaatcctgtctctactaaaaataccacaaaaaaaaaaaaaaaaaaaaaaagccgggcatggtggctcgcgccagtcgtcccagctacttgggaggctgaggcaggagaattgcttgaatctggcaggtggaggttgcagtgagctgagttcatgccactgcactctagcctgggcgatagagcgagactccgtctcaaaaaaaaaaaaaaaagaagaaatacatatgcattgtggaatggctaattaacctgtgcatcacctcacgtatcattgttttgtggtgagaacacttaaaatctactctttcagtgattttcttgcatatggtacattgctattaactgcagtcaccatgctatacagtagatctcttgaactcattcctcctgtctataaatgaaattttgtatccttgaccaacacattcaaggttttttttgagatggagtcttcttcacccaggctggagtaccatggcacgatctcatctcactgcaacctccgcctcccaggttcaagcaattctcctgcctcagcctcctgagtagctgggattacaggcacatgctactgcacctggctaatttttgtatttttagtagaagtggagtttcaccatgttggccaggctggtctcgaactcctgacctcaagtgatccgcctgccttggcctgccaaagtgctgggattacaggtgtgagccactgcacccggcctcaagcgttttaaaagatgctcttttctaaggattgactgtagtacaggaggaagattgacctgttgaaaagcctcagcctttacaagtgtaaaattatcagtatattactatcatctttctgatgaattaaataaactaaggactccaagtcaaaagtcttcaaactgaagtagaatagttgtatatagtgcttggcactttaatatttagtatcggtttaatgataatgtttgtgcctttgccgtctttaaaacatttttacatcatccctgtttgattacttggtgtgctcatgaagttgttggccactaaggaatcttaggctcagagaggttctggaattggccagtggtccttgaatcagctgctcctatgattctctaactgatttctcacaaagcaaacaagcaatcataacaaaacaactgtgcacactgctcttcttattttgttatttaaaaagtacttaggctctacttatgtttgttagtcaatttctcattacttctagttaatcaaaaggtcagaggaaatacttgaatattttcatactagaatactttaaaaaatcatgatttccagtaatctctttaaaacttggcaagttattttgatctaaaagtttatcttttgtgtgcatatttttaaagcttctagacaatctgatacctcaggtcctgttacaacaagtaaatcctcatcactggggagtttctatcatcttccttcatacctcaaactgcatgatgtcctgaaagctacacacgctaactacaaggtatgggcctctgcatcttttaaaaatatatatgcacacatacttacgtctaatggatagttgatgtttttcttatgatttgtaggatgtataagccctttgagatatgagttacatttagttttttcaagtttgtttgtctttcagctttgtttatgatagcttctatcatacaggtgttttggattttcatattgtttgtactcacagctaagattgattacagtgacagagctaggatgtgcagccaggttatagggggaagtggccctggtggagtctggagggatccgtgtacaggcttccttccctcccgtgaggctcacacaaaaatacagcaacatgctggtcctgcaggtaccctctgcctaacatgagccacaattccagactcacagaagaaaagcaggtgttcggcataaaccatgtgtttcaaatagtctgggcatggtgagccacttgttatcagctagggaaagtttatgtcagcgtaagaaactgttcaccagatacccccaagagccagcctttctgtctagggatgttttagttttttagttcatttttttttttaactttaaaattttctgttcatctgcaatttgttagatatgaagtatgtgtctaatttaatttttgtttttggttgtccccaataatgtttacagaagaatttttctgcactaattggcttgagttacttacattctcatagttctctagtttcagtagtttcatttattattttgttatatcaatctatctgtctgctcatctattagaagcatccttgttttttttttttcttttttagacagagtcttgctctgtccccaggttggagtgcagtggtgcaaccatgcctccctgcagtctcagggctcaagtgatcctcccacctcagctcctgagtacctgggactaccggcatgtgccaccacacccagctaatttttacattttttgtagagacagggtctccctaagttgcctgggctggtctcaagctcctggcttaagtaatcctccctccttggcctcccaaagtgctgggattacaggtgtgagcaactgcacccggctacaagtatacttcttaattattgtagcttaatggtatttatgaggggatcagttcccctgttgttctttagaattttctggatattcttctttattgattttgggatgtgaacaatagaatcaacttctacttgtagattgatttagggagaacttatacctcagatgttaagtcaccctgtccagaatgtgggatgctttcctatttgttcagaactttttaaattacctcagaagcacatgaaatttaaaggattttaaaaaaaacttaaagattatttcacatagctcttgcacatttcttgataaatgaatcctcaggtattcctctgtttttgttactaatagttacttcttatgggttttttttcccctgaaaatcatttatcaaacgtatgtggcttattttctgaaggatgtttgataattttggaagatatgaaagtcttcatattttacaaggtttgaggtctctttaagctgcatggttctcatgtcagctcccaaagcagaagacggcatgttgaaaaatgccgtagagaagatacttcttttccacctgttttcaactcatatcatcttgaatttcagggcacctttccatgctcctagtgcttgctatctgtttattattttccttcctgaataccctgaactccagcatgttctgctgtaattctggcctccctggcatcttggactcctgtttcctttgctctgtcatccccgcggtcagctcctgctgcgcagcttctcagctgaagtgcgtttggagtgcctggcgtgtcttgctggatctttgagtattgcctctggtttccttggttccttctgctgagttgctcagcgtctccactccccatttcttgtgtggcccttcctgcactcctctgattccttttgtcttccctggtttcttgctttggtttcgagtctccacagaacttttgcagctcttctgaagacctggaagctttttcatcttaattctcatctcatgacctcttttcccttctttgagagctagaacttcccatggtgaacttctctttccagaattccatgccttcttttccctcccacttacctgttgtccaggagaggtcagattgctgtgcatattggaggagaaccctttcttccctgggctcttcatctcacatgacatcaccacatcacctcgttccttggaccctcagtggtgtcactgctggatttttctttcctttggctggccttagggcacacccaggttgactagcgtagtcatggtatttagatccactcacattttcagtttctgtgtctgtctcttgcctgcttctgacttcgcccagagaaagcttctctttcacaagggttcttagatttatgttcactgagcaccttcttttctgaggcagtgttttaccaatatttattttcctagtcagtctcgccttacctttcttgttatgcatgtctttggtcctgacccattctctgagtctgtaaaatagaattgctgtataatttaattacatgaaatcctttagaatcttaacacatcttacacctgatttaatattttattgtatccaaattgaaccaaccctatgtgaatttgacagtgatttctcccagggatcctagtgtataaggaataggacttagtattttctattttttgatataccacataccagatactgattatgatggacatttaacccttttttctcattatgaaagaaagttaggaattatttcttccagtagcgccagtgtaacctgaaagcctttgaaagagtagtttttgtatagctatctgaaaggaatttctttccaaaatatttttccagtgctgacaacaaacacgcagacacaccctgcaaggtgagtgtacggcgccgcacagtggaggcatctgctgcagccgtcgatgtttgtgtctttggttgtacattatgagatcgtgacagggccagtaaccgtgtgttctctccttcaccttcccaaggtcacgctggatcttcagaacagcacggaaaagtttggagggtttctccgctcagccttggatgttctttctcagatactagagctggccacactgcaggacattgggaaggtttgtgtcttgttttttctccttgggttgtggctggcacacttgatgtgcgtcttctgggctgagttcatctaggatggagcctggttctccagggtgcctccgggagactcctccctgccccacgtgcttgcgtcacaggacccaagtctgactctgccttagccatgaagtttagggggaagtttctatttgtattctatttttgtctgttatcatgtattagcttagacccagtttagtttggaaaatcagtgggtttcaaaatgtgtttgtagagtcctttatttcttaacttgaccttttcaagtggaaaggggcaaaacagacgggtaagggggcggggcgggaggtgtgacttgctcttttgtgcctgaggaagtaacagagctggggttgacagtcatattctctgacacagatagtctctgacttatctcacagaaagtcagcggcagagcctgagttaaaagtctcgtagattttctttttcttttttttggtggctaatttcagttttatttatatttgtttatttatttattatactttaagttctgggttacatgtgcagaatgtgcagttttgttacataggtatacacgtgccatgatggtttgctgcacccatcaacccatcacctacattaggtatttctcctaatgttatccctcccccagtcccctcactccccatgggccccggtgtgtgatgttctcctccctgtgcccatgtgttctcattgttcaatttccacttgtgagtgagaacatgcggtgtttggttttctgatcttgtgatagtttgctgagaatgatggtttccagcatcatccatgtgcctgcaaaggacatgaactcatccttttttatggctgtatagtattccatggtgtatatgtgccacattttcttaatccagtctatcattgatggacattcgggttggttccaagtctttgctattgtgactagtgccacaataaacatacatgtgcatgtgtctttatcgtagaatgatttataatcctttgggtatatgcccagtaatgggattgctgggtcaaatggtatttctagttctagacctttgaggaatcgccagactgtcttccacaatagttgaactaatttacactcccaccaacagtgtaaaagtgttcctatttttccacaacctctccagcatctgttgtttcgtgactttttaacgatcgccatcctaactggcgtgagatggtatctcattgtgattttgatctgcatttctctaatgaccagtggtgatgagcattttttcgtatgtctgttggctgcataaatgtcttcttttgcgaagtgtctgttcatatcctttgtccattttttgatggggttgtttgcttttttttcgtaaatttgtttaagttctttgtagattctggatgttaatcttttgtcagatgggtagattgcaaaaattttatcccattctgtaggttgcctgttcactctgatgatagtttcttttgctatgcagaagctctttagtttaattagatcccgtttgtcaattttggcttttgttgccattgcttttggtgttttagacatgaagtctttgcctatgcctatgtcctgaatgttatggcccaggttttcttctaggatttttatggtcctaggtcttatgtttaagtctttgatccatcttgagttgatttttgtgtaaggtataaggaaggggtccagtttcagttttctgcatgtggctagccagttttcccaacaccatttattaaatagggaatcttttccccattgcttatgtgtgtcaggtttgtcaaagatcagatgattgtagatgtgtggtggtatttctgaggcctctgttctgttccattggtctatatatctgttttggtaccagtaccatgcagttttggttactgtagtgttgtagtatagtttgaagtcaggtagtgtgatgcctccagctttgttcttctagcccaggattgtcttggctatgcaggctcttttttggttccatatgaagtttaaaatagttttttccaattctgtgaagaaagtcagtgatagcttgatggggggatagcattgaatctataaattactttgggcagcaaggccattttcacgatattgattcgtcctatccatgaacatggaatgtttttctatttgtttgtgtcctctcttatttccttgagcagtggtttgtagttctccttgaagaggtccttcacatcccttgtaagttgtcttcctaggtgtttcattcccttagtagcatttgtgaatgggagttcactcatgatttggctctctgtttgtctgttattggtgtataggaatgcttgtgatttttgcacattgattttgtatcctgagactttgctgaagttgctaatcagcttaaggagattttgagctgaaccaatagggttttctaaatatacaatcatgtcatctgcaaacagggacagttttacttcctctcttcctatttgaataccctttattgctttctcttgcctgattgcgctggccagaacttccaatactatgttgaataggagtggtgagagagggcatccttgtcttgtgccggttttcgaagggaatgcttccagtttttgcccattcagtatgatattagctgtgggtttgtcataaatagctcttactatgttgagatacgttccatcgatacctagtttattgagagtttttagcatgaaaggctgttgaattttgtcaaaggccttttctgcatctgttgagataatcatatggtttttgttgttggttctgtttatgtgatggattacgtttattgatttgcgtatgttgaaccagccttgcattccagggatgaagctgacttgattgtggtggataagctttttgatgtgctgctggattcagtttgccagtattttattgaggattttcacatcgatgttcatcagggatattggcctaaaattctctttttttgttgtgtctctgccaggctttggtatcaggatgatgctggcctcataaaatgagttagggaggattctctctttttctattgattggaatagtttcagaaggaatggtaccatctcctctttgtacctctggtagaattcggctgtgaatccatcctggactttttttggttagtaggctattaactattgcctcaagtttagaacctgttatcagtctattcagagattcagcttttttctggtttagtcttgggagggtgtatgtgtccaggaatttatccatttcttctagattttctagtttatttgggtagagatgtttatagtattctctgatggtagtttgtatttctgtgggatcggtggtgatatcccctttatcgtttttattgagtctatttgattcttctctcttttcttctttattagtcttgctagcggtctacctattttattgatcttttcaaaaaaccagcacctggattcattgattttttttggagggttttttttcgtgtctctatctccttcagttctgctctgatcttagttattttttgtcttctgctagcttttgaatttgtttgctcttgcttttctagttcttttaattgtgatgttagggtgttaattttagatcttttctgctttctcttgtgggcatttagtgctataaatttccctctacacactgctttaaatgtgtcccagagattctggtatgttgtgtcttcgttctcattggtttccaagaaaatttttatttctgccttcatttcgttatttacccagtagtcattcaagagcaggttgttcagtttccatgtagttgtgtggttttgagtgagattctcaatcctgagttctaatttgattgcactgtggtctgacagacagtttgttgtgatttctgttcttttacatttgctgaggagtgttttacttccaactatgtggtcagttttagaataagtgcaatgtggtgctgagaagaatgtatgttctgttgatttggggtgcagagttctgtagatgtctattaggtccgcttggtccagtgctgagttcaagtcctggatatccttgttaattttctggctcattgatctgcctaatattgacagtggggtgttaaagtctcccactattaccgggtgggagtctctttgtaggtctctaagaacttgcttcatgaatctgggtgctcctgtattgggggcgtgtatatttaggatagttagctcttcttgttgaattgatccctttaccattatgtaatggccttctttgtctcctttgaactttgttgatttaaagtctgttttatcagagactaggattgcaatccctgctttttttttgctttccatttgcttgttagatcttcctccatccctttattttgagccaatgagtgtctttgcatgtgagatgggtctcctgaatacagcacaccaatgggtcttgactctttatccaatttgccagtctgtgtcttttaattggggcatttagcccatttacatttaaggttaatattgctatgtgtgaatttgatcctgtcattatgatcctagttggttattttgcccgttaactgatgcagtttcttcatagcgtcagtagtctttacaatttggcatgtttttgcagtggctggtactggttgttcctttccatgtttagtgcttccttcaggagctcttgtaaggcaggcctggtggtgacaaaatctctgcatttgcttgtctgtaaaggattttatttctcgttcacttatgaagcttagtttggctggatatgaaattctgggttgaaaatactttttttaaagaatgttgaatattggctcccactcttttctggcttgtaggatttctgcagagagatctgctgttagtctgatgggcttccctttgtgggtaacccgacctttctctctggctgccctttccttcatttcaatcttggtggatctgatgattatgtgtcttggggttgctcttctcgaggagtatctttgtggtgttctctgtatttcctgaatttgaatgttggtctgccttgctaggttggggaagttctcctggataatatcctgaagagtgttttctaacttggttctattctccccatcactttcaggtacaccaatcaaacgtagatttggtcttttcacatagtcccatatttcttggaggcttggttcatttcttttcactcttttttctctaatcttgtcttctcgctttatttcattaatttgatcttcaatcactgatatcctttcttctgcttgattgaatcggctgtcgaagcttgtgtatacttcacaaaattctcgttctgtggtttttagctccatcaggtcatttaagctcttctctacactggttattctagccattagtctaacatttttttcaaggtttttagcttccttgtgatgggttagaacatgctcctttagctcggagaagtttgttattaccgaccttctgaagcctacttctgtcaattcatcaaactcattctccatccagttttgttcccttgctggtgaggagttgtgatcctttggaggagaagaggtgttctggtttttggaattttcagcctttctgctatggtttctccccatcattgtggttttatctacctttggtctttgatgttggtgacctacggatggggttttggtgtgggtgtcctttttgttgatgttgatgctattcctttctgtttgttagttttccttctaacagacaggcccctcagctgcaggtctgttggagtttgctggaggtccactccaggccctgtttgcctgggcatcaccagcagaggctgcagaacagcaaatattgctgcctgatccttcctctggaaacatcgtcccagagcacgaaggtgtctgcctgtatgaggtgtttgttggcccctactgggaggtgtctcccagtcaggctacatgggggtcagggacccacttgaggcagtctgttcattatcggagcttgaatgccgtaccgggagaaccactgctctcttcagagctgtcaggcacgtatgtttaaatctggagaagctgtctgctgccttttgttcagatgtgcccttcccccagaggtggaatctagagaggcagtaggccttgctgagctgcagtgggctctgcccagttcgagcttccctgctgctttgtttacactgtgagcatagaaccacctactctagcctcagcagtggtggacacccctcccccagccaagctcctgcatcccaggtcgatttcagagtgctgcgctagcagtgagcaaggccccatgggcgtgggacccgctgagccaggcacaggagagaatctcctggtctgctggttgtgaagactgtgggaaaagtgcagtatttgggcaggagtgtactgctccttcaggtacagtcactcatggcttcctttggcttggaaagggaagtcccccgaccccttgtgcttcccaggtgaggcaacaccccgccctgcttcggcttgccctccgtgggctgcacccactgtccagcaagtcccagtgagatgaactaggtacctcagttggaaatgcagaaatcacctgtcttctgtgtcgatctcactgggagctgtagactggagctgttcctattcggccattttggaagcatcccttgttttttgaggtggagtcttgctctgtcgcccaggctgacgtgcatcggcacaatctcggcccactgcaacctttgcctcctggtttcaagcgattctcctacctcagcctccggagtagctgggattacaggcacctgccaccatgcctggctaattttttgtatttttagtggagatggggtttcaccacattggccaggctagtctcgaactcctgaccttgtgatccacccacctcagcctcctagagtgctgggatcacaggtgtcagccaccacgcccagccatattttcagatctccctctctttgccctaaaccactgtgcttaataagtagtttttagtggccagcagtctccatgtataacacattttagcaaaatggaaaatactatatgttttaaatttgaacgtgagattatactgaaataaaaatcatctaactgggattctttaaatagtaagattttcttttttgtatgtgggtttttttttaaccttattattatgactgtcatatatagaaatggctgtttttcagttacagtcagtgaatgtatcaaatgctgccttatccaaataataaaagtaaattattaataagtcacaatttaatgaagattgatgttagttgatctttatattcttgaaatcagccatatggttgtgtgtgtatgtatatatttttaaaggtacataaagataataagctcatctctgaaaatttttacatttggcataagaataactggataattaagcatcttattctctggcctgtgtctttacagttaaaggtagatttactcacctctccttttttgtttttctaagttcatcttttttgctgtttcaagacagaggcccattttagctttctcgcatatccttttgtttgtactttggaagcctcacctgcttaattgttgagtttttatccgtggtcttttagagggggatatgtagggtagaagctttcacaggttcttgtttgcacttggcccctgactgttttgaggaatctccctcactgactcacagcatggcaaggtttcagatctctttctgccacacagcagttctgaggcagctggaaagatatccagatgcttagattgtcaggccaggcttgagatatacaaactattgagccttatctgtgaccttgcttaggtgaaggcatcagagcccctgcaccaacatgcataggcctctgcatgtgtgcggggctgggtgttgaggtctgagcacaagtgtagctggagaggtgagcttgatgtggcgacgggtatgagcaggttttcttcagacttctgtgagtttacctagttccaggatttaaaggcacagagactttagaattaaaatagaatcattttctttttctaaatagcaacactaggaataaaaaataataattccacattcttgacaggtaatgttttttcttgtcttctaatccttatttattccatactcatttttatacataattgaaatgtattatgcattggatttttcttttgcattatattatagacgatttttcatgtaactccttactgttccattttatatgttttgtctggtttaagactttatctgcaaaccgggaaactgtctctacaaaaagaaaaacaaaaatagttggccgcagtggcatgcgtctgtggtcccagctactcggggctgaggtgggaggattgcttgagccttgggaggttgaggctgcaaagagccatgatcatgccattgcactccagcatgggtgacagactttatactgtctgttttgggtgatttgataatgatatgccctgatgtagtttttttatatcttgtgtttcttgtgcctgggtttattgaggttgggtctgtggcttcatagtatttttaaagtttggaaaattttaggccattctttctttctttctttcttttttttttttttgagacagtgtctcgctctgtcgcctgcgttggagtgcagtgacactatcttggctcactgcaagctctgcctcctgggttcacgccattctcctgcctcagcctcctgagtagctgggactacaggcgcctgccaccacgcctggctaattttttgtatttttagtagagacgaggtttcactgtgttagccaggatggtctcaatctcctgacctcgtgatctgcccgcctgggcctcccaaagtgctgggattacaggcgtgagccactgcacccagctaggccattatttcttcaaagattttttttctgccctgcctccctccttttttccctctcttaaaggggctgtgatttcctgaatgattgcttagtgttgtcccatagcttactgatgctcttttcagtgtttgattgttttatgtgttttctgttttgtatagtttctattattgtgttttcaagttctctgatcttttcttctacagtgtctactctgttgttaatctgttaatctgttgttaatcctgtccagcgtatttttttttttgtttttgaaacagtctcactctgttgcccaggctggagtttagtggtgcgatatcagctcactgcaacctccacctcccaggctcaagcaattcttctgcctcagcctcccgagtagctgggactataggcacgtgccaccacacctggctaatttgtgtatttttattagagatggggtttcaccatgttggccaaactggccttgaactcctgacctcaggtgattcatccgcctcggtctcccaaagtgttgggattataggcatgagccaccgtgtctggcccctgttcagtgtatatcactaattttgtttttatctctagaagtttgatttaggtcttttaaaaatgtctccctgtgtttctgtttagctttgtgaacacaattgtaataactgttttaatatccttctctgctagttctaagatcttctaataacttcccagttcttggtgtttctcattggttgattgatactcctcgttttgggttgtattttcctgcctctttgtatggctgccaattttttattggatgcccaaccttgtgaattttactttgttggatgctatatatttttgtgttcccatagatcttcttgagctttgttctgaggttagttgagttacatatagatggtttactcttttgggtcttgctttataatttgtcagatgggttggagcagtgcttagtttaggactaattttttttttggactaattattcctctttaggaataattaggtaccatgcttaggaggcaagaccatcctgagtactctacctaatgaaccagaaagtttgggttttccagtccgcctgctgagaacagtgactttctagccctgtgtgagcgctgagctctgctccttctaatcctttccaatgcttctttccctggcctcagggagttttctcacacacatatctctgctgagtactcgagagggaccttccccagatctccagagctctctctgtcttgttttctcttctctggtgctctgtcttatgaactgtggctgtcttggtctccttagattctcagcacctcttcaattcagagggttgcctgtccctcctccttgtgccacagcctaggaactctctcaaagcagcgagttggggcagccatagggctgacttagtctctcgtctcccagggatcactgtccttcattgctcatgtccagtgtcttgaggactctgggttttgtctgttttgttttttggtttgctttggttgtctcaggcaggagggtaaacccagtccctcaccctcattgtgctcagtagtggaagtctcactctattacattagatattagtatttgtagcagagccctggttccctggtacttggggagctcttgaaaggccagaaacagcatgctttctcaccttttccagggcttcagtttctggtgcacatcaagcattccatacacatttgttaaagtcctttgttagacaagtagtgattcacaggttctatttgtaattttttcagttaacatgtattgggtatctgctgggagctagtaaaaacaaaaagtggtgtgtgacaaattcaattctgacaagaacaaccttaaacacttagaatatactttgagcatatcagaattttaaaaatgtgtggcccttgagtatttgaaaccaacaagaatctattgcttattagtagaggatattttgttaaacaagtggagagagaggcattttcagtctaattggtgttggcttttagcagctgatggaaaccagttcgtgattagccaggcagtggtgaaacaggctgtgcattctgaatgcctaggtatctaggcattcagaatggtggcgctctttgagttagcatcttcttctttcttgattcttttttttttttttttgagatggactttcgctcttgttgcccaggtaacaactccagtgcaatggcgccatctcggctcactgtaacctctgcctccctggttcaagcgattctcctgcctcagcctctcaagtagctgggattacaggtgtgcgccaccacgcctggctaattttgtatttttggtagagatggggtttcactatattggtcaggctggtcttgaactcctgacctcaagtgatgcacctgcctcgatctcccaaaatgctgggattacaggcgtgagccaccactcccagccccttcttgattcttgaaaaggacattgggtgctgtacatctcgttatagatgttgataaaaatgcttgtgagaagagtaacattaaggtagttatttggtcatttttgcagattattttaagacaattctaggactgatttgtggtaaatcacacattgctgtatcatagttgtgttcactgaacatattcaggggctctacagatgcagggctcttagctgctttgcacacttctgaattcctgccctgcgaacaggactggatacctaatagacaacaggtacttgataacagtttattgaattaatgagtgaatgaacagatacataaatgcatgaaagaatggttgtaatgtatataacttggatttcaagactttttactgactgttcaaaataagaaattgaaaactttcctctgattttcctctactatttacacaatttaaatggaagttatcttgtaccttcaatttctgtctaggattcgtacaataacgggtcatctctgagtcgcttaatgtctcacttgtctttctacagtgtgttgaagagatcctaggatacctgaaatcctgctttagtcgagaaccaatgatggcaactgtttgtgttcaacaagtaagagcttcattcttttcctcttctgttaagacgttcgggtatgacagcaaaacgctgctactccttaagaggcaggcgctgttggcataatcagctgggaggattgtggggtccagcgcagcactttttggctcagtccatgattgagccaagaggccatccttcccttcactccccaggaggacgaggtctgtcactgtggagggcagaggacaccagaagctcctctgcaacctcgctagttaacttccagtccctcggagtttctgtttagaatgctcaatctcatttagaattgcaaggaaacccaaaacgcctatttaaggtacaaacagcacttcatacaatatctcatgaggtattaatagtgattcacaggaagaatttcacgctgtgagtctttgctaacatatccagttatttacagatggatttgatatttgtgtgggagattcttaaaagtgttgttcacgccacattgttgatgcctcatttttttcactgtagttgttgaagactctctttggcacaaacttggcctcccagtttgatggcttatcttccaaccccagcaagtcacaaggccgagcacagcgccttggctcctccagtgtgaggccaggcttgtaccactactgcttcatggccccgtacacccacttcacccaggccctcgctgacgccagcctgaggaacatggtgcaggcggagcaggagaacgacacctcggggtaacagttgtggcaagaatgctgtcgttggtggaagcacgaaagagcaagcaggaaatactttgtaaaagaataaaaacgaaaaatgttagcgaacatcttctaatagtctgctgtattcagagaactctaggagatatatatggttgatgcaaagatgatttaaggcatagcccggccttccaagaagtgtgtggccagtgagtgagatgggcttgggacttacacatctcagaggtgggggtagaggaggaggaacactgagtgggctgagaagcagccagctctcattgccaaagtgtgtcagcaaaccagaatgcagttcataatgtccccacccattcaaagcacaggacctgtagagtggtgtggcatgtgttggtggcacttttcaggcctgtaacaaggatgaaagaacagcttcatagcagcacagtagtgctggtgttcagaggtgtgtgaaggccatagaagcatcttggatatattaccttgtgttttgtcagctttatgactagaagtctcttttcacttaaatttgttttttttttttttgagacggagtcttgctctgtcgcccaggctggagtgcagtggtgcaatctcagctcactgcaagctctgcatcctgggttcatgccattctcctgcctcagcctcccgagtagctgggactacaggcgcctgccatcacgcctggctaacttttttttgtatttttagtagagacggggtttcaccatgttagccaggatggtctcgatctcctgacctcgtgatctgcccgtcccggcctcccaaagtgctgggattacaggcgtgagccaccgcgcccggcctcttttcacttaaatttatgtttgtgtttttaatgcctagtatacaggacttcttaaattgccttaagtatgaacaggtatttgagttgctaatctgtatagtagcaataatagaatcccttgtttttccttttataaatttagcgattaaatagctacaattaaaacactagagtcaggagtcaaggaaaatacccatgttccaggctgtatgttagtgatgtacttactatatattggagtttcaggagtaagtctgtttcaatgctttctgtaaccatttggggtattaataagcatgtgagtgtgtgcatgtttgggttaatttcatatatgtttcttagaagggatatcattgatgtaaatattttaaaggcttgtcctccaaaaaaatcatgtaatttcttctaaattactgatcttttaaatgaccttcacctttctctcaaatctcacttaagactgggctgagtagtcagtttcctgtagcagaaaaaagctcagacttgagtagccttctgcgagtgaggagacttgatggctgtcaggcagctgtaaactctaaatagagtgtcattatctgaagagggcgatgctgccacactgagtggcctttcaagttgtttctcaatctgacacgttctgatcgtgtgaatgtgaaattggtttgagcaggagtatatctgagtgcagaggagattatttaaagatattctcattctctgcttcccttttattcccatttggcagatggtttgatgtcctccagaaagtgtctacccagttgaagacaaacctcacgagtgtcacaaagaaccgtgcagataaggtaaatggtgccgtttgtggcatgtgaactcaggcgtgtcagtgctagagaggaaactggagctgagactttccaggtattttgcttgaagcttttagttgaaggcttacttatggattctttctttctttttttcttttttatagaatgctattcataatcacattcgtttgtttgaacctcttgttataaaagctttaaaacagtacacgactacaacatgtgtgcagttacagaagcaggttttagatttgctggcgcagctggttcagttacgggttaattactgtcttctggattcagatcaggtttgtcacttttatctttcatccatcatacctgttcctaatttagtacaaattaccctaaaagacactgaaatctactttaaagaaatgtggtctgcatgtttccctcatcagttgctgctgcttatctttttcatgcacctagctggtgcagaaggcctggggcatagccagcctcagcaagtcagcatccttgccccagctccctggactcaaggctaacctggggttggctgttagggatttccaaaggtttgtcccatccacttgcctcccctccaaaataagtttgaatttaaattgtgagatacaattaagatttattgtttggggaacatttttgcaaaatctagagttagtttaaacagattatcaattattaccataattgatcatctgcagtttcaagctatctaacaggttcacttacctctttaaaaaggaatggaatttagcaggacagtaactgagacccgtgctcctggagtccatgtgggagctgtgtggctctgcacaagcatttgcacgcttcccctcttgactgcattaccttcctcctatagttgctgtgggcaccagattctggctagtcctgtcccttcatgatgcacattttcctcaagattcgtcccagttaaatcactgcagatgaaactgccttttcatcgtcaaaatttaactgtcatttttgagccgtgatcttgggctactttcttatgtggggtaggaatatttgtgagttagaaatattacacttctctatttccttctagacgtaaatctgttaatcctgtcagcactgttactcacctgaaagggtctgtttccctaggagaactgagggcactcggtcaacactgattttccacagtgggtattggggtggtatctgcttgttttttttgttgttgttgtttgtttttttttgttttttttttgagatggagtctcgctctgtcacccaggctggagtgcaggggtgcgatctcggctcactgccagctccgcctcagaggttcacgccattctcctgcctcagcctcccgagtagctgggactacaggcacccaccactacgccaggctaattttttgtatttttagtagagacgaggtttcactgtgttagccaggatggtctccatctcctgacctcgtgatctgcccgcctcggcctcccaaagtgctgggatgacaggcgtgagccaccgcgcccggcctggggtctgcttttaatgaaggaggcatcaaggggtgggctttgcgttggcctgatgctttcatctttctttcacaaaacctgtccgaagaaaatccgtctaaatgggccattgctctcctcaggaaatagtcattgggaacttcttttcctttcctttgacactaggaggctgactggggagaagccctggtctatggctgtgggcagcaggggctgagaggagcaggctctcaggggggcacgggtaccccaagggaagccagagccctgatttgttccattctagtaagaacaaagactgctctggtttcatgtttgttctgattgcctttcatcaaccggtcccctttctcccagttcttaagattcagtacagtgacagttttatgaacaagaatagaacactagaacagacaaaccattgaactctatgctgataaagatttattgagctcctgctgtatgtttgcattctgcccagaggctctgagaaaaccaggccatatgctccatgctttatccatggaagctccccgtcaggttgggaaagctgacagctgcagggaatacagtgtgacacaaaactggctcccatgcagcccttacgtgtcgcctctcagatggttgggggacgaaggtcgactcctttgggtatcttattactaaaccagtttcagggaatctgtgccaccctatctgccattaacgtgaacagatgagtccccaaggtgtaattttgggtattgtctgatgtctcttggaatttattatttgtttttccaatgagatttcacctcagggtatagtaaagttgttgaggggattcctggatgtgttctgcaattatctaggctgatttcagaatagagttatgcttatagtcaaatttatcagctgtcaagaattttatttaaaatttatgcagataagcaggaggaaaagaagcctggtttttacattttaatcctattattgatgtgaaattttattttccttcctgtaggtgtttattggctttgtattgaaacagtttgaatacattgaagtgggccagttcaggtaatagcattttattattttagatttttttcttcttcttgtgtacttacatgtaatttaggttattaagtgaatgtttaaactactgttaggcatttttgctgttttctttaaatggaaatctgactaacatactgtgcatttttgcttctcttaaaaattaatgtatatctcaagacttgtttggaagtagttatgtatctgaaaattccatatgttgtcagtattcattgcacatttcaaagcatttaattgtgttgacagatggtggaatgaaatcttgtggtggagcactagtttttaaatcttcttagagaaagcagttttatataatgttgtctttagtaattattatgcatttgtattctctgcagctttttcttgctagatgttgaggttttaatacttcttgctagtccattacaggtttataattattaaaagttaaaattcttttagtacctaaaatgcttaataaacattgtaattaggaaaatttagtgcagaaggaaagtgttcccagattccctggggtctggaaacatagtgtttattctaattacatgacacctccactgtgttttggggcaagttactgtttctcttttgagtttcaatttcttcaagagcaaagaggcagaggagagctaggaagatcgtagctgctgtgcccctgtgccgtcgggtgccttctacctgctgcctccgaacctttacacatgtccctgctctgcgcgagggcacagatgggatgcactgtggcaggggtggggttagagtagatcacggacacctgttagcttgatgtgtgcttgctgtcaaggttgaatcatgaattattttatgttgcttatattgatatgtatcttaattttaaaagaaaggtctaaatggatgtttttgtttttagggaatcagaggcaatcattccaaacatctttttcttcttggtattactatcttatgaacgctatcattcaaaacagatcattggaattcctaaaatcattcagctctgtgatggcatcatggccagtggaaggaaggctgtgacacatggtaacgggacacacctttcactgtcgtcttcggtgtcgtgatgtgcttggcagtgttcgttttcatatacccactttgaacgttgtcagtggcagccatgtgcttctcaggctctgcatgtgtgtctgtgtatgtgaaggtactggttagagacgtttcaaaagagaagagagcatattctttactctcagcaatttgtaatcttctcagggaaaaaaattcaagaaacagtaagataacctaaggtacagatagattctgaatataaagttcctgttcattcacatgaaacgctaaaagttcttcacttgatcttagccaaaaggccaagaagcgatgcaacactaaaaattcttaaatcgaacttgccgtgaattaaattttgatctctcatccagtggtattggagatatagtttgacttgggttcagggctttctgttttgcctgatgattttgctggagcttaaataaggaacccaggagatggccagctgtgcaagcccccagcctgtggaaggagctagtgtggttttatgaatgagttgcaaatctttctttgagctttttgaactgatcttccagcattgccctattgacccctccctgactcctttgctggaatctgtaggcttttgaactttgacagggacacatcctaagacccttgcaaactcccagatgtgagaatggcactactacttagagtcttttcgactcagcgtgtgtgcagaagagcatcaaccgggctgtgttgcgaggcagggccttggctgacctctcagtgtttacatagctaagccagttagtgtttgccacggcctcacaagggcttcagattcacacagccaaagtatagattattaaaggcataggtgtttggtttcctggacttggagggtctttggacagaaaatcagtaggcaaccacacccagtactttgtgctgggaagcttggtcatctgtgagagggtcagagagtatacccatgcgtgcatgccaccgaagggtcagtgagtattcctgtgtgtgcatgtctcagggccggagagagtatgtgtcactgagaggtcagagtgtttgtgtgtgtgtcaaagagggttgcattgtgcccttcactgaggggtcagagggtgcctcgcgtgtgtgtgtgtgtacgtgtgtgtgtgtcactgaggggtcagagtgtgcctgtgtgtgtgcttgtgtgtgcgtacatgtcactgaggggtcagagtgtgcctctgtgtgtgtgctcatgtgtgtgcatacgtgtcactgaggggtcagagtgtgcctctgtgtgtgctcatttgtgagcgtatgtgtcactgagggggtcagagtgtgcctctgtgtgtgtgctcatgtgtgagcgtatgtgtcactgagggggtcagagtgtgcctctgtgtgtgtgctcatgtgtgagcgtatgtgtcactgaggggtcagtgttcctatgtgctcatgacattgagggtcagagtgtgcctgtgtgccaatgaaaggcatttcttatatttttttatatgtggtcatagtagaccagttaatttattttgactcctgtgttagaccaaaataagacttgggggaaagtcccttatctatctaatgacagagtgagtttacttaaaaaagcataataatccagtggctttgactaaatgtattatgtggaagtctttattgtcttttcagatgaatcaagtagattattcttgagaccaggaatgttgctgttttggttatttggaaagttttatcattttcaaattgacttttgaatttgagtcaccttttttcagaagtggtgttaaattataggagccctaggttttttttctttttttagaagtcatcacaaaatgatcagtgttcagaggaagagctttgaccttccacatggtataatgattgataaccttaattcatctcttaccataaaccaagtatgtgtaagggttttctttatttcttgaaagcattttgtagatgttgagagcagttttccaaatgtaatttccatgaaatgcctgataagggtacccttttgtccccacagccataccggctctgcagcccatagtccacgacctctttgtattaagaggaacaaataaagctgatgcaggaaaagagcttgaaacccaaaaagaggtggtggtgtcaatgttactgagactcatccagtaccatcaggtaagaggaatgtatgttggaactgtcgtggatactttattgacccgtgcagatggaaggaagtgccatgtggtaacgctcactgttaactgtgttactttgaaccaggtttgggctttctggggcctgggtagatgccggtgcagggggatggggagggaggcggggggtgggggggtgtggtggagttggggaggtgcagtggcaggaggtgttgttggtgtgtatcctttttttttttttgagatggagtctctctccgtcgcccaggctggagtgtggtggcacgatcttggctcattgcaagctccacctcccgggtttaagcaattctcctgcctccacctcccgagtagctgggattacaggcatgcaccaccatgcccagcaaatttttttttttgtatttttagtagagatggggtttcaccatgatggccaagctgtttcgaactcctgacctcaagtgatcctcctgccttggcctcccaaagtgctaggattacaggcgtgagccaccatgcccagcctggtgtttatctttaaagtgggcacagccacaggagttcacctgactcctggtctgagagtcacgagatcgttcaagatagtgaggccctcttttccaaaacgaggaccaaaaatcaattgacagtgttggtcaagatggtagaaaccttaaaatgatagaaatctcaactctgaaataaaaactttatttgtatatttatttaccactattttgacatagggctaaggtctttttctttgagctgatttctggttttgttttcttaaagtggcataagaattcaaagacattttgaggaaggctgagtgcagaaatctctctttttaaatgacttctcctttcttttaacttgcactgttgtctagccctcacttattttgtcaattctttttagctgtttgtctttgaatcttcataaagccatagcttttctcataagaagcagcactttctttgttcattcatattttaatgaacccctgtagtatttaattaaatacttaatgcctaattaaatcacataattgcaatgcaaaagtacatgtatcataaagaggtctgaaaatgagcaactggcaagcaggtggtggcaggcagagctgcttgggtgggtgggtgtcatggagaggagttcatcagccacatgttcagtgagctctggatatgtctgtttagaaatgatcactaataaacttgtgctcaaccatgtatacctctgggaagcaggtgctcttcagtagattgcctctgcagagaacacagaattgaagtgaatgtccacaaaggcaatgagccacctgcagaatagtttagtcaaggctgtgtttgaagtttgccaaagattaatatacatttgattttcatgttgtgccttttctctgattgtgaaatattacaaattctatacaaataacaatgatggcaaatcctcctgagcaaagtgtgcaccttgtatgtgccctagaggaacttgtgtttcgttctgattcccctacatttctcatgtcatagagtgggggttgcattagtgtccccctgtcctcgctgggatcacatctgtttggatcctagagtcttccagctgaactgggacaagtataacagacggacacgtaggggtggaaaggcgtctcttggcagcagactttctaattgtgcacgctcttataggtgttggagatgttcattcttgtcctgcagcagtgccacaaggagaatgaagacaagtggaagcgactgtctcgacagatagctgacatcatcctcccaatgttagccaaacagcaggtttgtccccgcagccttggcttgttgttgcatagtgatggtagcttaaggtccttgtgaaaggtgggtggctggaatcagctcttccttcagtcctaatctgtgccttgatagcagttctccgtgctagtcatgggacagctgacttcatttcttctcacaatgccatctcaggttggtattgcccacctactttacaggggggatcccacagctccgagaggttatggaggtgatcaggcagcacacagctttagagtgctggggtgagggcgggccaaggctaactctaaagcccgaacccttacctcctacactgcctcctgcattctggtcaacccagtgttttatttggtggttagatttttgtttttgttaccttactgcttgtaatttagcagttttcctttcctttcccttcctttcctttccgacagggtctcactctgtcacccaggctagagtgcagtcgtgtaatctcactgcaacaacctctgcctcccaggttcaaccaattctcccacctcagcctcctgagtagcaaggaccacaggtgtgcaccactacgcctggctagttttttgtatttttagtagagatgaggtctcgctgtgttgcccaggctggttttaaactcctgggcgcaagtgatccaccaaccttggcctgccaaagtgctggcattacaggtgtgagccacctcgcctggcctattcatcactaatcagaatttctatgatcaaatgacatgaatcattgtttccacaactgcagtggaaggaaatggcctggcagtgccagtttcagaagcagcctgcccccagtcaggcacaggccactgtgcccccagtgtagcagcacctctgtagctcacagagaagggtggtggggacctccttgaggcagctctgccagaaaatctcatgagctgcctggcacagcttgaggttgccttttaagtggactcagcaaatacatgtttgttcatcttgattatacacaataaacaactactctgtatagtacgagtagtccgtggtttttggcatttgatttaaacttagaggcatgtgatattgatgttactgccttcatgactgcacccccattctgatttcataatggaatgttatcttgagaccagttagacaacaggacagggatcttggcttctggtgagattgacagcagttttagtgtggtcagggtctccctgcctacagatggttttagaatggtgccctggaagctttatcccattcttttctgtgcgtaatctgagtagagtggagatcgaaggcctgaatacatagtaaatacctgacttaatatctgccgcaatggaaattgtgtgatacaacatttatgaaacgcttagtgcagcacctgccaggtagctcaccacaggtgcatgttgcattcagaagtagtgctagatactatcctgttactggcagtgcatacatcagtgatcaaagcagattaaagaaagaccccctgccttcttggagtgaagattttgttgggatgcgggtaaggggacagacaatagaaaagcaagtgagtgaagtctataccatggcggctgatcaggaacaccgtacagaagaatccaggagggaagagagttaggtggtgtctgcggtgggagtggcattgttcagctggtgatgagaagaagctttggtgatctggtgacatttgagtgaatttgcagaaaggaaagatacaagcctaggagatacctggggaaggaacattccaggcagagcaaatagcagtgcaaaggccctggcggggggcggacatgctgttagggtacaagcaatgagggtggaggagtggggcagccatggggagggaagggagtgaggcctggtggggtgaggccagtgtggaggagccttgagagggtttgcgctgatgtggtgtaggttttagcaggatcattcttattcctgagttgagaatagccttgagggggaggtgagggcagagcagggccacccatgtgagacccggcactggagtggaatggcccaagtcagcatcccttggcagcatgaaagcaaaaccagcaaggtttgctggtggcttagatgtggcatgtgagagagagcagggctttgggggtgatttcagggtgaggacagggtggctgtggacaaggtagggcagacattgggggcagcaggaggtcagagcctgtctggatgtagcagttgagaccccataggtgcctaatgaggtgaggccagcatcaggtgtatgagcctggagttgtcgagagactgtggggcagggggtcagcatctgagatgtccactcacagtggacccagactggctggagaggaggaggagcttgaataccgagcctgctgagtcccagctccaaggtcaggtaggtgaggggagccagtgctggggcagggggagtaggcaggtgtggggttcctaaagccaagattttttttaaggcattttgtgcaggagggcgacatctgctgtcagcaccttgggaacttggcccaggtttggcagcaccgagggcactgatgagtgcttttggaggagcaaagggagccaaaccctaatgggaatgtgttcctgaaaggacaggagagagacttgggaaaaggttttacttgaagagggaacggagaaatagggcagtagccagaggaggagaggagtcggcaatgggttaagttggcagaaatgaaggcctgtttacgcactgagggcagaagcaacagggaggatcagttcatgacacaggagacacaaatcgccgttgtggtgttcacagacatgggttaggattggctgcatggatgacagagcactgtgggttctcccagagttgctggggaggaggcagagttggtgagcacaggcgagggtccaggatgcaggaatcctggagctcaagtcagttgttcccttgttgtaagatgtggccagtgttgtgagcttcacatctgtgccttgaaaaacaccacatctgtttgcagagttgtttactatgtatacacactcagtagaaacaaaaattggaaacagtcagtgcccaccatcaataagtaatggttgaacacactgtggtataagcttagactattttagcttgggctattttgcatgattaaaaatgttctggccaggtgtggtggctcatgcctgtaatcccagcactttgggaggccaaggcaggcagattgcttgagctcaggagtttgagaccagcctgggcaacatggtgaaaccctgtctctactagaaatacaaaaagtagctgggtgtggtggtgtgcgcctgtagtcctggctaactcaggaggctgaggtgggaggatcacttgagcccattcgtgcgccactgcactcctggggcacagagtgagactctgttagaaagagagagagagaaagaagagagagggagggaggaaggaaggaaggaaataaatggaagaaatggaagggaggaaggggagggaggaaggaagaaaggaagttcagccagttgccttgggagttctccattgcactgggttaagtgagaagagcagagacgtttatgatttttcaaaacaactaaaacaaaacctctgtgggtgagggggcaaggatatggctataggaacatggggcagattaagaaagggatatacacacaccacttagcatttgttacaactgttgtgggagggatggagtgcagaaaaagaaaaaaaaaagtgcacaccatcccatgtatgtgtatacaaagggacgcttggaagactggtccccaaaatgttggtaatgattgtgtcagggtgctgcagtgctagttgattttttttcacacttttgtatatttgagtcttttacagaaagcatttattatttatgtaataaaaatctaaatgacaagatttctgttatgggaaaaatgtagctatacagtgttgttgtaaaaatgtttgcttggttcaccactgaacttaaaatgcttttaaatgagggaaggtgacgatgagatgattatgatgatttgcccttgagttacatagctggtgtacaggaagctgtcgtttcttttggcttacgtagaaatgtttgtggtgtctaattccacagatgcacattgactctcatgaagcccttggagtgttaaatacattatttgagattttggccccttcctccctccgtccggtagacatgcttttacggagtatgttcgtcactccaaacacaatggtgagtctctcgcctggctcagcagatgaatctggacggcttgttcaggctctgattactgggaccacccccagaatgtctgagtcagtcagtttgggtagggcttcttgagagtttgcttttttttttttttttttttttggtgtgggggtggtgcggaacagagtctcactctgtcgcccaggctggagtacagtgtcatgatctcggctcactgcaagctctgccttccagcttcacaccattctcctgcctcagcctcccgagttgctgggactacaagcgcccaccaccacgcccggctaatttttttgtatttttagtagagatggggtttcaccgtgttagccaggatggtcttgatctcctgacctcgtgacccgcccatctcagcctcccaaagtgctgggattacaggcgtgagccaccgcacccggcctttttattttttttggagatggagccttgctctgtcacccaggctggagtacagtggcgctacctcgactcactgcaacctccgcctcccgggttcaagcaattttcctgcctcagcctcccgagtagctgggactacaggtgcgtgccactgtgcccggctaattttttgtatttttagtagagacggggtttcactgtgttagccaggatggtcgcgatctcctgaccttgtgatccgcccgcctcggcctcccaaagtgttgggattacaggtggctctcgcaccaagccaagagtttgcatttttagcaaattcccaggtgaaactaatgcctgcttttctgggagcacactttgggactcagtgatagagaggtttattggtaggatagtaaaataggagttattttctttcacaaaattggcaattgggggaaatttaatcttccttttttcttcagctgtgacttatgtattatgtttattttaggcgtccgtgagcactgttcaactgtggatatcgggaattctggccattttgagggttctgatttcccagtcaactgaagatattgttctttctcgtattcaggagctctccttctctccgtatttaatctcctgtacagtaattaataggttaagagatggggacagtacttcaacgctagaagaacacagtgaagggaaacaaataaagaatttgccagaagaaacattttcaaggtatgctttctatctgagcctataactaacccatgccttttgggaagtcacgtgatgtttcacagtcagtaagtctggaataatacctggtcttgcttcacttctgagttgggtaaagaagtctgtatcagtgtaattttctaatccgtcctgcattatctatggctcttggttcatacctgtcttgaagttctgtcatgttctgtctcttgtcctcagtagagatgctacagcagtggctcgcctcaggcagggcagggcagtggggtggctgtcctgggggcaggcagtaggggcacgctgacgtcagggaagttgaaacccaagagaagccagtaaaagtgagtctcagattgtcaccatgtgctggcagttttacacgctgtcagtaataaaagtcttctccctgcagggcagcctgcctccaataaatacgtgtagtatcaaatcctgtcttccctcataaattgtttggaagctccccaaggacagtgatgaggcactcgtaagtgcttgctgcctagatgggtccctctccacctttgctagattctgagcattcactgagttagagctgcttctgcaaatgtgctgcttctgctaagtggctgtgacttcatgcagccttcacttggtttgtcatcagtggagatgccctgtgttgtcgaaggagataagcccagtaagcctgctgggcaccttttggtttgcaggttcagcaggcagcccatggctttccctgtgtcgcattgaagcagctggctaaaattgatgatacattaaattcctgtgacagatgatcagcttgtatttgtgtaatggtgtacagttcacaaagcttaaaaaaatgctacctgccatttcatcctcagtgaggaaggtgatacacagagagaccaagtgactgtgtccacggcgacggcgctctgcatttcactttagcggttaatgtactctacctatatttttactttatatttaccatatatcttttcatgtatacttggcgtaagtgctttatagtagtcacctaattcactgtcatcttttttgtttcttggaaggtttctattacaactggttggtattcttttagaagacattgttacaaaacagctgaaggtggaaatgagtgagcagcaacatactttctattgccaggaactaggcacactgctaatgtgtctgatccacatcttcaagtctggtaggtgaatcacattagtcttcctggagtgtctcgttccccattctgcactatacactctcagagtgtaggagctgtgctgcccggtagaaactctgccttgcccagtgtgccagttgaaaatatttgttgctgtaagagtacacctgataccatgtgacccagcagttccactcttgggtatatacccaaaagaatggaaagcagggtggtgaaaagatatttgcatgccagcattcatagcagcattattcacgatagctaaaatgtggaaccaactgaagtgtccctcgatggatgaatggataagcaaaatctggtgtatatttacagtggaatattattcagccttaaaaaaaggacattctgacacatgctacaacatgggtgacccttaaggacattatgctaaatgaaataagccagtcacaaaaggacaaatactatgtgattccacttacatgagggacctggagtagttaattcatagatatagaaagtagaatggtggttgccaggggctgcaggggaggggagttatttttacaagatgaagagagttattctagaaatgaatggtggtgatggttgtataacattatgaatgtacttaatgctactgaactgtacagttaaaaatagttaagaggaccaggtgtcatggctcatgcctgaaatccaagcactttgagaggccaaggcaggaggattgcttgagccaaggagtttgagaccagcctcagcaacatggtaggaccccatctgtacaaacaaactagccggggatagtggtgtgcatgtggtcccagctactcaggagactgaggctggaggatcgcttgagcccaggaggttaagtctctagtgagatgtgttcatgccactgcactccagcctcggctatagagtaagaccctgcctcaaaaaaacaaaacaaaacaagacaagagccaaaaatggttaagatgggccaatcacagtggcttatgcctgtaatcccaacactttgggaggtcaaggtaaaaggatcacttgaagccaggagcttgggaccagcctgagcaacatatcgagacccctatctctacaaagaaaatcaaaaactagctagatatggtgggcacatgcctgtagtcccagctacttgggaggctgaggtgggaggatctcttgagctcaggagttcgaggctgcagggagctattattgcactccagcctgggctacagaatgataccctgcctcttattaaaaaaaaatccaaaaaaaaaaaaaagtaaacctgagagcttcctcctcctgtgttaaatttggaggccaagatgtttttgttacttttacaaatgatcaaggacggtgaaggttgggcatggtagctcacacctgaaatcccagcactttgggaggctgaggcggggtgatcgcttgagcttgagaccagcctggacaacatagcaagagaccccatctccacaaaaataaaaaaataaaaaaaaatagccaggagtagtggcatgagcctgagcccaggaggtcaagctgtagtgagccatgatcatgccactgcactccagcctgggcgagatcgagaccatgtctctagagaaagaaaatgacaaggacagtgaacccaagaaagtcataagatgccagctgtgcagcaagcatggaaagcagccagtccaaattaggacagtgtgttttccaagaagaacgatcgtttgtaatgagaatgctttgctttaaataaatgactaaatagctagaagcctagttctaggggataggcacgtctttcttctctcaagaaaatagaaaggcaattctaatttctagtaacagcaaacagcattaagtcatggtccaaatatgaggcaaaccaaaatgtggcttgattgttcagcagttgatctgttggaagcccttgatattaaaaaggttctcctttaagcggcttaggagtcacgatcaaagacctatagaaagagatgccatccttctaggatccttggctctcttgggaactagattcagatagtcataatgtaaatactgcttgagctttctttctttctttctttctttctttttttttttgagacagagtttcactcttgttgcccatcctggagtgcaatggtgccatctcggctcaccgcaacctctgcctcccaggttcaagcaattctcctgcctcagcctcccgagtagctgggattacgggcatgcaccaccacgcctggctaattttttgtatttttagtagagacagggtttctccatgttgaggctggtctcgaactcctgacctcaggtgatccacccgcctcggcctcccaaagtgctgggattacaggtgtgagccaccgcacccggcccgagctttcatttttgaaatcaatgtatgactgaaacactgaagacttactgacttaattatggtttcagaacagaatgaaaatgtcttcggttctgatgaatataaaaggaaaactaaccaagttaatttggcaagtagatggtagagatagaggtggggagtggaaggggaactaaaatcttcacctagcattgttgggattatatggttacatcatctgaagttgacagaccaaaatatagaggcttcagaggtctccaaatagaactaaacatgtaattcagattgttaggaggtagtataaatgagctaaatctcatctttattacggtagagttaatgggtgatgtctaaagttgtctgaagtctataaatcatgacaaattatgatgtggtgattgtattcaacagtctttcagttgcagggataaaaccccagtttaaactagagtaagagaaagaatgtgttggtttaagctcctggaaagtgcaggcaagggtagttggtaggactgcatctagtgttgtaattctgtggtctgcattgtatatttatgcatctcagctctgctttcttcttttcatttatataatttttaaattttattttaaagatagggtctcactttgtcgcctaggctgaagtgcagtggcatgaagtgcagtgcgaggctcactctagcctcgaactcctgggctctagagttcttcctgcctcagccttctaagtagctgagacaataggcatgtaccaacatgcctggataggttttaaaatttttttgtagaaatggaagtcttgctgtgttgcccaggcgggtctttaactcttagcttcaggcgatcctcctgcctctgcctcccaaaatgctgaggttataggtgtcacccaccacgcccagtctcatctctgcttcctgtgttagttttgttctctggtgggctgttttcacatgaccgaagatgacctctagcaggctgtgttctcagcccctcaagtaggcctatgtgattggccttgcatgagtaatatgggtgaccataaacccctgaatgctctggtccacatgggccaaatgggagactggacagcattccattgatgaggaggtggggctggtctccgggagtaagggagaggagcacatgcagtaactgatggtctgctgcaagggatagcagcacagcagttagaattttggaggtaactaccagaactgaaaacagaaatgataacaagtagttgccttaaaaagggatgggagcagggtgcttttgtgatcaaagctcctttctcttactggatttttgtacacattttgcatacatatcttagagtaaaagatagcattttcagccttggtccatttgaggatactcttggcgtggcccgcctccatgctagcaggctctggttgtgccaagttcagttgagcatcctggctcttgcctgcacggaacttccagtcagtgcgtcagtatcacaagtcttgatatttcctatgaagaagaacagtagtgcagtgacagacgaaatgggtgggcaggcagaggcaggatttctgagggagagaagtagctagctttttgcagagaagagttccggcacccaagagagcagctgagagtacaggcaggcaggcaggatgccggtagggcccggccgcacggcgccacagaatcctggagaaaggggcctcttcatggcctctgcattcagctgctgtcaccctccgcacaggccatggccaaaatttaattttcatagtggactctagtttttgagccttacttgctattattgaaataattttcttgtttctttttaaagatcttcggattatgcttcactgaccactgtaataagtttaaagttgagaaaatatggcttgttaatgaatgataggtcaattttagtatgttggtcattttaatattttgccaccagttggtttggatttgatgccaggaggagacagcctcatttctaaggactagtcttgcctttgtgggataagggtggtgtgttctgtgtccttctacatgtccgagcgatctctgtgcagctcaaatgtggtcactgtcttattgcgctgatttcctctccttccatctcacaattgaggcaaaatattgttactgttgaagtgttgtccaataggacttccagcagagacaggatgtctgcactgtctaatttagttgcctttagccacatgtggtgttctgtacctgaaatgtggctggtctgattggatagcttaatttataattttatttaattttaattaacttaaatttaaacagctctgtgtggatagtggctcctgtatgagacagtgcaggtctgttgagaagcagctttactggtgggagtggagggcttggagagggcacgtgggtttcctgctggtatcttttgaccttatttaatctgcccaacatttgcaagtaagttgtgtgtgtgtgtatatataaatgtgtgtttctgtcttcttgtttcctttgactgcatttatttgaaagacactaggtggcagaattactgtatttgattggtttcaagataagagttgaaataattcatctcgtgtttttatataagtaaggtgtgtttagcatgtaaaattggtaatatgtattcacgtactgcttaaacaaaggctatgaattccacccataaaccgaaaatgaagacctttaaatttgtccatttcaggcgtgggtacttcttaaataatacctggttcaggaactagtcagaatggcacccttgactttttgtttcctgcttttcctcttgttgggagaggagggtattcatcccaaagtggtttgcctatttcacattccatctaggataagcagaatagccaagaaagatagctgtcctcctgtttacaacatttggggtaaccagcatccctctcttttggtccaagatagactggtttagaaacagatgatggcaccagaggcccaggaggtggaaacatcagctttgtttgttgtccatgtggctgaattagagctgtctggccttgtagcctcaacacggccttccagctttgctcaccgtgattttcaaggacacatcttgtgctcttccctgcctgccatccagactatacccagtcagggtggcaggagctgctgccccttcctccctgagtcctggtcgtgggtggtggagatgtgccatgacgctcacggaggcatgctcaccccttcctctgtggcagaggggatggctgcacgacagctcttccctgtcctttccaaagcgtctgtggttccactttttggggcaaagcaggaatactggaagagagagaaagtggtcctttctatagtaataaagttgacattgattcaagttcatgcttggggaaaggacagggctactaacaattataatgctgggagcaatggaattttctcatgggtatgtggtaggtttaattttaattatcccagttaattcttagaactgctctgtgaagtatttcccgctttgtgcttaagttctaaaagatcctgtgccaaaaccaagaatgaaaacccaagcattctttcttgcccatcgatctttctctcatcaggccacttcttgggttgatagtggtgagtgtagccgctgccactttcagaatacccaccatgggccccagtcactgtgtggcgtggagaagagatggttctctctgtgtcatagctgaacaagcccagcccagagaggtttctgccctaggagctctcgatggtggaattgggatgcgatcccacatcctgcctgttttgaaaacagcattctttatttccaattcctgcttccattgttccttttaatatttctttgtttagctcacaaaaacacggcttgcggagctgctgcgtgcagctgtagctgtttctctgggtgcagcctgcatccgccttcctgcccgcctcctttcctgcactgccatcgtggtctccgggcacttggtccctttctcttcccctgagtccctttggctcccctgtgccacccttgtgatccacaggctctgccttctttctgtctcagactgctgctcatcactactcgggaccctaggaagggaggttccaccgagaagcatcttctcatctcagccacgttctcagtgccactgttgtctttgttaggtaatggtagctactgtaacaaataaaccaacatttccatggcttcacaccagagaaggttgtttcttggttttatgacaatgtattgagggtgttcttggttcacggatggttttcctccatgtgggaattcggggacccaggctcctttccttcttttggttctgttctccaggccttcacatcctctgtgtctggttggggacaaggagagggaaggtaaagaaggctttgtggccttggataagtgacaggcatgcctttgctggtgttctctcgtggtgacaggtcacagccccaccctgtaaaaggggactgagagacgtcgtcctgctgcttcccagcagcagcactgtggtctctgatgtgttttctgtgaggataaaaacaggtgattccaggatgaggaaagtcagggaaacccttggaaggaggggaccaggcgggtgtcaccatgggattagtggtggcttcagaatgagctgcagcgagtgccatgccttctaaagcttttgctattctgatatgcccacaccatgcccagcaggtgtctgccttgctctccgcagagagagtgatgaatccttctcatgagcctctgtccagttgttcctccctccacctggaagggaccctgggttcctcataacatcccagcggaacaggggaccttctatcctgtccccaagttcatcctcatcctcctgccggcttcctggcccctcttatgtctgcttcctgacgccacatccttctggattctctggaattgaattttgcctttgatgcttatttaaaaatatccattgcaggccaggtgtggtggctcacacctgtaatcctgtgcactttgggaagccaaggtgggcagattgcttgagcccaggagtttgagattagcctgagcaacatgttgaaatcctgtttctatagaaaatacaaaaattagctgggcatggtggcgcacacctatactcccagctactcaggaacctgagacaggaggatcaattgagccccggaggccaaagctacagtgggctgtgatcgtgccactgtactccagtctggtcaaacagagtgagaccctgtctgaaaaaaaaaaaaaaatccattgcatacttcaccgtagcgaaacatgtatgtcttacctttcctttcctgcctgtagctgctcttttacacttaacagccacactaagccagccttaaatgaaaaacaaaccagcacttcctgtgccctcctgcttccttcatgaggggtccctccctctgtgtacactccattctcattgcccatggtggtttgtttccctcttgtttctcaagccatggcagcctgcctcttgccctctttactaaaaaggcctttgcagaggctgcctgtgttctttctttctaggtctctctcatcctaggccctccagcttgattctgtggagctgccctcttgtcactcagtagcttgtggggtcttctctgtctagccacttaattgattgtgttcctcgagttgctgtccatggtctctcgttactgttttctctgtgtttctgcctctctccttggccttggtaggtccatcccctttgtgaccttggctgttgctctcatggacaactttctcttgctggtccttgtagtcctggcatccagcttctcgacacgggacttgtcctgccagtacctcagacttgcacttaaaattgaactagcaccactgtcactctccagggcctcttcttgttaattagatcattagggatgttcagaatcccagcatcatagtatgttcctcctcccgctaccccaggaaccctaaccttacctcctcctctctatctactaggaggtggccctcagagtccgtctcatcttccacctgaacttccctaataggctccagcagctgccaccccgggggctgagtacttcctccatgccttgtgcagtgctgagccctttacctgggttctcctgtttgctccttattacagccctgcgaacagatactgctcttaattccatcttacacctaaggaagctgaggccccaggtaaggtgcatccaaggtcacccaggtagtagacagtagagccacgatctgaaccaggcagtctgattcagagcctgtgttgacactcagccacctagaacacagcttggattgtgggtttctattacctgttcaaaacccctacatcccgggtctgtccctgcacgtgctctgtggcctggctgcatcttccttgaaggcagtgcatgcctcttcactcagggggcccatgcaggaacagagggccccacagaaggatgaggccagtgcagaatgggctggaggggacaatgctgaccaggaagcaagtgtagagaaatcccaggaaacctggaggagccagagacaaggcattagaactcctcgtcgtgacctggtctgcattctctgagtgtgctgcttctgttagctcgcttccttggtctcaggttatagtttaaggcattgtggagccctaaaaagcctgtactctgtttttacctgttttaggaccctttcactttggggatgtgttgattttttttttttttttttttttttttttgagatagagtctcgctccattgcccaggctagagtgcagtggcacgatcttggccactgctgcccctgcctcctgggttcaagcaattcttgtgctcccgcctcccaaatacctgggattacaggcacccgccaccacactcggccaatttttgtatttttagtggagacagggttttaccatgttggtcaggctggtctcgaactcctgacctcaagtgatctgcccaccttggcctcccaaagtgctgtgattataggcgtgagccaccacacccggcctgaaatttaaatcagaaataaaattttgatcccaacagtgatgccaggcagcccagatctgggggagagggtggccttggccagctgggcctttctctgtttcccaagtcttgctgcctctccctgctgggctttgcagcctgtgcatgtctctgtgcctttgaccttgtttatccaaaggagaggatagaatgaagtcatgattcctggagccctgagaaggatgctgtggagaaatttgccggtagaatctagctgagtgtgttgctgaggtgccagcattgtgtgtggggaggctgaccgcttggcctgcctaggcccaggatgctccatggccgggcacagaggccacttggctgtcaggtgtcaggagcctgcagagggcacacagagcctggaccgcaggggggtcctgctttctcacctggcctccttcagcatttctgtccctcagtccttagcaagcccaggagctgttgagtttggcaggtgccgagtgctgttcctgcctgtgtagctgtggctcagtcctgtgggggccccgctgtggcccgagtgcagtgattcgaggcgctgagtgttccctgactccttctccaggagctgtgttcagactttcgcagctcttggcttggagctcctggagggcttggcattgccgaccaatgtggaggtcgacagtgagagaggaggaatgctagctttcttgaccagtccattaaataagtgggatattggccaggcacggcggctcacgccttaatcccagcactttgggaggctgaggcgggtggatcacgagctcaggagttcaagaccagcctggccaacatggtgaaaccccctctatactaaaaatacaaatattagctgggcgtggtggcaggcgcctgtaatcctagctacttgggaggctgaggcaggagaacagcttgaaaccggaaggtggagtttgcagtgagccaagattgcgccactgcactccaacctgggcaacaagagcaaaactctatctcaaaaaaaaaaaaaaaagtaggatatctgtttctgcttagaaaaatcagaattttctaaatgccaggtgttctgaatacgtaagtatgggagacgactcagcctgtttcatttttatgtaaaatcttcgcgtagccatgtggcactggaccgagatgaaagcaaagacatttctccttaactttgtttctaggaatgttccggagaatcacagcagctgccactaggctgttccgcagtgatggctgtggcggcagtttctacaccctggacagcttgaacttgcgggctcgttccatgatcaccacccacccggccctggtgctgctctggtgtcagatactgctgcttgtcaaccacaccgactaccgctggtgggcagaagtgcagcagaccccgaagtaggttcataatgccccacagcccagggcgccagcccagcaccctgtcctgagactcccagtaacctgagctttggccaccgttaaagcattttcattttccattttttgtgagggcttgtgaaatttctgctgcatattaatattcctttcatggacagcatattattgggacaaacatgcggtccagctaaaggcattcaaaatagcagttgctttctaaatgcgattttctttggcaggttctttgacaccattgcatcttgtgggatatgcttgtcatgctctgtggctcctactaagttctagtccttaaattggttccatagccagacatgttgcaatgtcttaacctcattataaagtaaatgtggttctggttatccttagataatgaagtaacagtgtagcaaatttcaaaacctcttggaaatgttattttaccattcaaaaaggcttactaaggttctcgttatgggtggccctctttttgcaaaaggttttcaggcttaagctccatttctaggtgctccaacactccattatttgtatatgtatggaaataaaagctgtgaccacccccaaccctggcccccgcccagctgaatcctcagcacagtatttctggaaggctcaagatcccacgctggggaaaagaagttctggagacaaaagagggcaggtgctgccgtgcctctctgctcagtatggatactggaccttgtgctgccagggctcccagtagggccagttcatggcactcagctggaaagtccactgttgggaggcattcttaaccatccactctgtgccgtatgtagtggggtctggtcattctgttggaggagacagaccagtgacgacatttgaaatgcttggtggatgtcttaggcctgttacgatgactgagcactgtgggggcaggagacagaaagtcagtgtctcctagttctgtgctgctttaacgtgcatagaaatcagctgcggattcagcagatcactccttttctgacagatgggcctgcttactctgatgttatatcagaaagctctgaatctgggaattgtgtcccctgaattggagtaacagaaatgcttagatgatgagtgtttaaaagaaataaaccaaaggtaaatttagtttggaattcagcaagcgtcttcattcagccctctgagggcaaactacagctttttgtaaatgtaggtaaattctgtgactgtttcgtgaccccctctgatccagttttcctttataaccttctgtattgttccttctattatcctgaaataacattaatagattaggctgggcgtggtggctcatgcctataatcccagcaccttgggaagccaaggcgggcagatcacctgaggccaggacttcgagaccagcctggccaacatgatgaaatgctgtctctactgaaaataacaaaaattagccgagcatggtgacaggtgcctgtagtccctgctactcagaaggctgaggcgggagaatcgcttgaacctaggaggaaaaggttgcagtgagctgagatcgcgccactgcactctagcctgggtgacagagtgagactccatctcaaaaaaaaaaaaaaaaaaaaaaaattaatggatcaatggatttttaacctaataattaaatttcaaaaaatatcgttctttaatggtaatgtaaaggtaaaattaagataatatgtaacaagcatgtgagtgtctaaggtgtccccgtggtggaaggaaaaaataaatccccataagtgtccaagatgcccatagagagcagagctgttctggtttaaacccctgctcttagcactgtgtttttccagctgtgggtggtgggggatgagtatctttttatttccatgagatgagaaaaatgaattactagaagtgtgaaatacaaaacacagctgctctttttttagccatagactcagcagccataaaattgctgtatccagttgcagaaattcctgctgcttactcttgaccctctctcggtttgtgtgcatctcctctcaggctggctcccagatgggagctggctccaggcgacactgggtgctctgctccaggaggtccttatgtgggtcctgccctagcctagcccctctcttatggactctgtcactgtgggtttatgattcactctcaatctgtcttacctcttggtgaactgttagagtcctgcctatactttggcgcttgtgggtgtgttgtggtacacatgatgtgttggtcacttcccagctcatcttgttctgagtcaccctagatttgggacattcattcgccaccagtaccgggcggtgtatggcctgagatttgggggggcttgtgctgctacaaattggggctgaatttgagttgacagtggaccttctttatgtctactgctcatatttgaattgcaaatactgcctcttctctttcagaggctcattaccctatagctgtattattgcaaagtgcacaattacagcttgagtgtaagtcacactgcgctggcaggacggcccactgagaaagggcacgtttcctgttcgttagttttcacattgacacataatttacaatacagtaaaatgtacttttctatcaactgtagtcagtaacagcccccctcccccaaccacatcaagatatagaggagtgctgtcacttcaaacagttccctcttcctctgccacatcctgcccctccccaggtctaaccaccaatccgtgctctgtccctctgttcagcccattgcagaaggccatagaaatagaatctataggctaggtgtggtggctcatgcctgtaatcccagtattttgagaggctgaagtgggaggatgacttgaggctgggagttcaagactagcctgggctgcctagcaagaccccatctccagaaaaaaaaaatttaaaaattacaatcacgtccctgtagttcagctgcttgggaggctgaggcaggaggatcacttgagctcaggagttagaggttacagtgagctatgatcgtgccactgtgctccagcctaggtgacacagcaagacgttgtctctggggaaaaaagaaagaaacggaaccacgcggtgtgcagccttctgagtctggcccctttcggtgagcagtgtctaaagttctgtcgcgtgttgcccacgcgtcggtggctcgctccttgcaactgctgagcattgtatggctaggctgtagtttgttttcacttcaccagttgggaaacagagaaaaggcactttttaaaaagtttaaatctgtagaattttggtttttaccagttctcttctaaatcctgagggattacaggaaaagttgttgtatttcagaatattcttagcttgatgtgacctctgtccccgttaaggccctttgccgcaatgggaaggacgtcgctcggtcagaccctgaaggtcagaggggcagtttgggagtgtgtcaacattttaactgtatggactagagccaagagtctcaaggtttataattcccacgtattcaaaaagaaaaaaacaataaagtgagaagtcagtgtagagtgaaataacctgtgttagtggggaagaagtgtttttaaacaggatttccataacgtataacatcaacatgtttagagtggtgatgtttcattgggaaacgaacagtaaaacatgaaagcagggaggttttcattctggcagttggcaactttcacggcagatggagaatttcaaaagcaattgctcaattatcaaacatagccagtgtgagttctgaaataaaggtgctgattgaatgtgcagctttatggtggattttgctattcaggcaagcattttaattttctgcctgttaaattctgttttctttagtttttcatatgtggtttattgtagcttaggaatagataactgagagtatatattacacatacaacattctgatatggcaatatttaaaacaacttgtctgttttagaactagaattaaacataatcatcttcagtattttgcaaataagctcactgccatccagaaacattgtcaatgcatctgttgctccttctagaagacacagtctgtccagcacaaagttacttagtccccagatgtctggagaagaggaggattctgacttggcagccaaacttggaatgtgcaatagagaaatagtacgaagaggggctctcattctcttctgtgattatgtcgtaagtttgaaatgcctgtaaacggggttgagggaggtggggaccaggagaacatcctgtgtagatgacacttgcatggaccctctggaacccagaccgcccggtgtcctgccaagctccatcgaaactaaatctagaatgaatgtttacttctgctgtgacatataattggagaccaggcctggccttccagtcactggattctaagttggactgtgagagtttttgcagctgactcatttatcaaatgcccggctattggctcacgcctacatgatgctgggtatgtttgttaatttgagggaagcaatggaataataataactaatgatttaaaaaacaaagtaagtgcattgactgtagtggggttctgattttaaatttttttaaaaattaataccaggagcagtggcttatgcctaaattccagcaactcgagaggctgaggtaggaagatcacttgagcccaggagtttgagacaagcctgggctatggtgtgagacacccatctctaaaaaaataaaaaataaaaaattatccaagtgtggtggctcgtgcctgtaatcacagctctttgagaagctgagggcggaggatggcttgagcctgggagttcgagaccagcctggcaacacagagaaaccctgcctctaccaaaaaaagaaagagaggaagaaagaaaaattagcctggcgtggtggtgcatgcctgtggtcccagccacctgagagactgagaagggaggattgcttgagcccagaagtttgaggctgcagtgagctgtgactgtgtcactgcactccggcctgggtgacaaggcgagacccctgctctaaaataatttttttaagttaatttgtagaaaaggtgttagatgttctttgtcacattttatgatggattcctgtttaaatgccgttctctttaaagaaaaaaaaataacttgtgggagtttttaaccataaaactagcatcacatatttaccatggagaatttacaaaaaaacaaataaacggaggaaaataaaacctcctgtaatcatactactcagagataacttgctgttagattttggtctagatttaatactttttctatatttatattaaaaatatttaaaacatatgcatttctttgtcacaaacatggtatcttatagatactactgtcacatagcaaaacagtgttaaatattctgaatcagaaaaggaagccgactctccaactgaaagaggtgttatcctagagactttttctggtgatgacaatttattaatagtcactttttgctttactttctctattgaagtagtttttctattttgttctacttttaaggataatataatttataatgctgtttttcacagaaatataagaaaaaagatactaattttataagttaataaagtttgatcatcccaaatccaaaaatctgaaatccaaaatgctccaaattctgaagctttttgagtgctgacattatgttcaaaggaaatgttcattggaaggtttcagattttcggatttagggagctcaacaaataagtataatgcacatatttcaaaacctgaaaaaaatcctaaattcagaatacttctgatcccaaacatttcagataagggttattcaacctgtactgtcagatgatcccaaatgaaaaatattaatcgttaaccaaatatcaaggaattgatcacattttacagtttctgcctaggattatgaatcaagatgaaaaggctctgcatgtttaaaaatatatatttttattttcttataaatcttaaatatctacacttaagatttatttgatatgtgggatccattcatattttggattcaacagttctgtcaaaactgtggcagtgataggggattctttttttcccactgaactatcacaaaattggaaaaagagtaattggagaaccccactggcttagccggcccgaagcccgggagagggcaggcagtgctgtggatggggtcatcccagcgcaacgctgcccctgctacctgcggatctcgctgaggcctgcctttgtcctttgacccttggccatttgttagtgtctctgagagctggactgctgtaccctacttccccagggggcctaacttcacacagcctctgccgcagtgcgtggttggaggtgacggccttggtaaatcgagtttcctacctcctcaattatttgtgctcatacactgtatatttttagtgaggtttatatttgggatgtgttttctccttcttaccctttctggcctttctatggcattaatacctggtctcttcttgtgtacttgaaaatgaatctctcatcatatttttccttagtgtcagaacctccatgactccgagcacttaacgtggctcattgtaaatcacattcaagatctgatcagcctttcccacgagcctccagtacaggacttcatcagtgccgttcatcggaactctgctgccagcggcctgttcatccaggcaattcagtctcgttgtgaaaacctttcaactgtacgtcttcatcctgccgactattgccagttgcagttttccctgccttaaaaatggagtattgaaatttttaactttaatttctgatttgcaaaatagtcatcttttgttcttttccttcttgctgttagccaaccatgctgaagaaaactcttcagtgcttggaggggatccatctcagccagtcgggagctgtgctcacgctgtatgtggacaggcttctgtgcacccctttccgtgtgctggctcgcatggtcgacatccttgcttgtcgccgggtagaaatgcttctggctgcaaatttacaggtattgggaagagaaaccctgatattgatttatattgaaaatttagcaggccaagcaaaacaggtggctggctttttcctccgtaagtatggtcttgacatggtcaccgatagaaacatggaaacatctgcaaacttgccgttactcgtgtgtccgatctgactgtttcttgtatttttttctagtctgcccttactaggatgaactgtacacatcagttcatcctttttaaatgagcatgaggttattttgggttgttaggtgttacaaacacactaatgtgtttttgtctattagagcagcatggcccagttgccaatggaagaactcaacagaatccaggaataccttcagagcagcgggctcgctcagaggtaatgctggaaacacaggtcgtccttgtgttaggacaacccaggatataaaggatatagatttgtacgggaataaattcacaggacaagaaatcgatgtgccttataggtgggtttactgcagaagtgccataatagaaccttcctacttttaaaacaaccagatctcactttctaaagagtaaaggatgaccggcaggatcacgtctgtgacgtgagtggaggcagtttgcactcctggtggctgtttgagaggtagcatttagaatgcctgtattcactgtcctgtgatgagtgggaaaataggttatcaggtttatcttagcaaaatcaaagcatgtcatctaattgctaaacaagagttggcaaatctgagagacattactcaatccttggcatgcaggacttacatctgcatcctgttgccattttatgtcttcaaagcatttaatcatttagttgtgtttgcaaagtctttgagaagcctttgtcagaaatccctacatctcctatgtgagtgtatttccatgactgcagaataagttaaacttttacctttttccttcccttgcggggcggggtggggggcagggattgtgtgtgtgagagggagagagagacagcagagaaggagaatataattatcatgctgtgtactttgagctgaaactgcaaaaaaggaaaaacacacaaaaattattatgcttttcagtctttagagtaccttgtctattatgcttttcagtctttagagtaccttgttgatggtgtttttaaatgggattgggcacaattaggtggacagtttgggatgatttttcagtctgtagggccaagctcttttgtaatttgcattatgaagttgtcactctcatagcagatggcgggagataaactattattactttttgaccctagacttagtcttcagtccagatgagggagattaaaagattataaatatcttgtgccagatgaggtgattttattttgaaatgaccatgaattcctatcagttgtcttactgggatatttgatagtggaatttgtgcatttgagtcttagatgatctgttttacatttattaagaaagcctttattagcttttatactgtgtattgcctgttgcagtgtttgagtataaatgaaatttctggaaaatattaatggagtacaaactgtgatacttaaaagtaaactagggcctgcatttgtatcatgacctgtttgagtattgatgagaagatagctgtgaagaaaaaggtttaaacaagtgtattttcctttaagaagccactaatagtgcatctccttagagtgtatatttctagaatcctagtgtgcagagtttagactaagactaaaaaaaaaaaaaaacaaattatactgtaatttcatttttatttgtattttagacaccaaaggctctattccctgctggacaggtttcgtctctccaccatgcaagactcacttagtccctctcctccagtctcttcccacccgctggacggggatgggcacgtgtcactggaaacagtgagtccggacaaagtaagtgtccagcgtgtctgcatgggaggcacagggcgctgagtgcctctgtcacctgtggcagatacagagagtgcagaggaggtgccgtggacccaaggagttctggcgctcggctcggctcagtgaagctgtggttagagacgtggggggccatcaaggtctgagggagccaagcagtgctgatgtgggacccttttggtaggagtgtggggtgagtagttagtgggtgaatcaaggaatagtcggccgtggcctgcaggcccctgactgcacaggccttcaagcacatgtcaatgccgttagcctccctccatctcctcataccttctggccacctgtgagttgcactgccactgccagccattctggtatgttgtcagcacctccactgctcatacctcatggttagggaccacctggagccttggtagagccttggtagagccttggtactctactttcctggacaaagttcagcttatgaatatgaatttagatttcaaaaaccagcagcccaagtataagaaagcgaaggttcagtcctgccttcttaggctctattcgctaagcacctgccctgccctggttgctggggagagatgagtaaagcagacaacccaggagaggatggcaaaggggccgctaacccttagtggtttagctatatttggaaggcctattggaagttcaccaggtgaagggggaggctgtgagggtgcccaggcaggtaacagaagtccaaaggggaaaacctgtggtgtggtgagccgtatagccacagcctgccggccggcagccctctcagcctagtgcggtgttcccaagcactggcctaggcctgtagctccagggatgtgaagtccccttgaacgccgcccatcatgttccccttatccatttttttcttcccaggactggtacgttcatcttgtcaaatcccagtgttggaccaggtcagattctgcactgctggaaggtgcagagctggtgaatcggattcctgctgaagatatgaatgccttcatgatgaactcggtacggggggagcagtggaggcaaggaatcctcagcttttcttgtgacttccaagtgggatttgtctcatcatcatgtgacccacttgttgacaacacatgttggggactccagtctgggcagggacgggatgtcggagagactccactctgaatggggccgggaagtggggaggactccatttcagatggggtcgggacatgggggttatgctgatcgagacagaaaagcacattgtttcagccacattagaatccacggaggtgttgttttgaaatccagctggccccaaggctgggtgtatggtttgggatgagaactatctggcctccactggaggaacaaacacaggatgttatcatctaagctccatggccaagacagaatggaagtcaaggttgcgtatttgccgtagacttcaacacagtgtcgtaatgcgtgacgtcaataacttgtttctagtgtcttggaagttgatctttagtcgtaaaagagacccttggatgcagcgagatttcctctactcacacctctgttagatgtagtgaggttcttcaccccccaaccccagatgtcagagggcaccctgcgcagagctaggaggccatgcaaagccttggtgtccctgtccctcacccgtgggcaggtcctgtgagcagtgggggggccacctcttgggtatggtgcagccatggcccaagcagggcttcttctcagacctactaggacgggagaaacctcctggtgctttagccctgcgttgatatgcagcaaatgggagggaagtgggcacctgggaggacaaatgcctgtagaggccgggagtgacggcaggtgttcatgaaaagagaccttgtggggagggcaacacaacagtgtgttctgatgtactgaagagctcaactgaaaacaacaggagaattagcccaaaatccatttactaaaattgtttatctttttttttttttttgagacaaagtctcgctgttgtcccccaggctggagtgcaatggcgctatcttggctcactgcaacctccgcctcctgggttcatacgattctcctgcctcagcctcccaaatagctggtattaacaggcatgcaccaccacgcccggctaatttttgtatttttagtagagacgggatttcaccatgttggccaggctggtctcaaactcctgacctcaggtgatccgcccacctcggcctcccaaagtgctgggattataggcctgagccaccacgcccggcctaaaattgtttatcttaagattcatgcagtgaaagctaacttactgagtgataaatttgcttagtgatctgtttattaggttttccaaatttgctaattgggctttgaacagctgtaaaagttctgactgtaaaagaaagcttcaacttttggcattcatgatgcttttctgagtattaaactaagatagatgttttacctgaaggatcggccaccaatctttaaatggctaaacaaaagggttgctaaaacataatccaaattgacataagaaataccatttttccaaccaaaattttggcattcatatggctacttttacgtatttcagctgcatttgaacatctttttcaaactttagggtggttggtgtatcactgaggtcttggatgacactttagctttgattttgtttttatgaattaaaattgtcataccaaaatttttatttcaagcaaatccaagagcataaaaaattaaaatattacttaaaatactaagagagaacagatatatattttactaagcatatgttgaatgaaattgttcaaatatttataacaggcatagagtagaattttcttaaaaatatttttgatggtataccaatttgtattttctcagaaacatttgccttattcttttttctgttgtgtttttcttacctgattgaaagctcataatctgttgttattgtttgttaacctttaatgctctgatttcaggagttcaacctaagcctgctagctccatgcttaagcctagggatgagtgaaatttctggtggccagaagagtgccctttttgaagcagcccgtgaggtgactctggcccgtgtgagcggcaccgtgcagcagctccctgctgtccatcatgtcttccagcccgagctgcctgcagagccggcggcctactggagcaagttgaatgatctgtttggtaattaaaattaaaatttatcttatttttaaaaagcattccagggccagtatagtactttgcaccaagtaaatgtacaataaaggcagtggatctaatacattgaaagcgtttacagaggtagctaaagagcagcacgggtgtcctcggctcagaatttcttcctgtgtgtttgccactttgccattcattgacatggtcatggacatagggctctaagcccttgaggaaggctgggccagacctcaggggagatgcagccccaaaccacgtgcagtcctgtggacggatgtgtagatgtgccactgaggaacaatgtcttgagctttcatcagattctcagagaattgcttgactgcctttcgaagttgatgcatctgtgctcacgtttgcacccacccacgaggtccttctgtttcaggggatgctgcactgtatcagtccctgcccactctggcccgggccctggcacagtacctggtggtggtctccaaactgcccagtcatttgcaccttcctcctgagaaagagaaggacattgtgaaattcgtggtggcaacccttgaggtaagaggcagctcgggagctcagtgttgctgtggggagggggcatggggctgacactgaagagggtaaagcagttttatttgaaaagcaagatctctgaccagtccagtcacttttccatctcagcctggcagtaagtcttgtcaccgtcaagttattgtagccatccttcaccctcacctcgccactcctcatggtggcctgtgaggtcagccaggtccccttctcatctgcacctaccatgttaggtggatcctaattttagagacatgaaaaataatcatctggaagtactttatgtcttaagttggcctggacatgtcagccaaggaatacttacttggtttgtgttagtgcttgtaattcgcccccagaatgtgtacacgttctggatgcattaaagtctggcctgtatccttaaagggccatcgctgtgctgcctgccctcagcaaggacacactttgcagacccacagaggctccgcctccacctcacaccaaagaaagggaggagtccaaagggcatcagtgccattactcacaaaatgataaatacacccttattctgaaccacgtggagtcatatggtttgtgatccctgtccttcaggtttcagcttagtggggaagtgggaaagtcagcgtgtgatcacagcacagggtgattgctgctgattatattatgtgcctgctgtatgcaggatgaaatactttatatgcgtcatcttatttgactctcacaaccccctgtgagataggctctgttactcccatttgacaggtgaggaaagcaaggcttagagaatttcagtgacttgcccaggtcctctgagctaggaagtagccattctggcatttgaacccaaggcctgctatccctagaacccacgctctcaaattcaacctatgacagaggcaagccctggtgctgtgggagccccaaggaagagcctctggcctggtggccacgtagcccaggagagatttctacaggagcccacagcgctgaaggagagagaggcagcagagtaagggggctttgtggcagagaggggactggcactttggggaataggtgggtcaggactgaatgtaatggagccatgtcagagctgtccttctggaagggcaagggcacctggacgcgctgcccctcagtgctttggacggttccacaactgtgattcacacggcttccccaaacgaaggtacacgagtgggcattctgtgactcggtacttccctttaggccctgtcctggcatttgatccatgagcagatcccgctgagtctggatctccaggcagggctggactgctgctgcctggccctgcagctgcctggcctctggagcgtggtctcctccacagagtttgtgacccacgcctgctccctcatctactgtgtgcacttcatcctggaggccggtgagtccccgtccatgaacggtgggttcctatcatagttcctgtctgcttcaccatgtttttattttgtgctgcctgtttgccaggtactaagctaggaattggggatggagaggtagataaaatatgcatcaggaagggctgggccccatctcttactctccaatatattggagtctacactggaatttaactggaatttgcttttttagtcattttatttagattttgaagtttcagctttcatcaaaaatacctctaaactttatgtctctgtgatctttggtcttagctgttttatgtatttagtcttatatgatcataagattaataacattacattcagaagattatttgttttctgtcagagttaaaatgtttgtttttatactgcattgtaatattaacgtactgtaaaataaaagtggcttgttcttttcaaggaacagtatcctcaacaagggtcattagccacaatttttaaaaaattggacgtcatagtttacatgttagagggcgttttgaagctttgtatttttaaattaaatgttatagagtgatgttttcatgtttcataattgttttcatctgtgcatttgtagccaacttgaaaacaaagatccagggattactacttaaaagccagacttcttggaggttatagtgatgattttgatagtatcttgagccgtctcataataacctcagggtgagagatggccaacaggagacagtcgagggacttagaaatctgaatgaaatctgaagttcaaatcttcagacatataccactaaccaagagattggtacctcagtctagtattgtctgtttgtctaaaattggttctaaggaatctaggctagtctgtctatccctttcaacttttgtgaggctgcacaaatgtaaaatgttgaataaaaagcactgatggaagtgtgtagaaattcttctctttgttctgttgtaattttagttgcagtgcagcctggagagcagcttcttagtccagaaagaaggacaaataccccaaaagccatcagcgaggaggaggaggaagtagatccaaacacacagagtaagtctcaggacccatttttttcttacatgttgttcctccaggacttaaaaatcattcacagagacgtgcaccgcggtgagtgtggactcctggaagcgcaccgtagctccgctgtgtcctgctgctcctccctagctgtcagggaggctgtagtccattgctttgccagctcttttgtttccgagtgaacaccttatccgtacacatgcggctgtctctgaccctacagaccagctgggatgccactgggggagcgctcccttccccccgcacttcccacactctgcagttattctgagatccttgagggcagggaacaggtttgtcttctttgtgttctcagaaattaatgctcggcctctggtcagcaagcaacaaccttttgttgagtgataatgaataaataaatgtttcccacatgagtattcagtaacctcagtgtcaggttcagccatctgttttggtggatatttaaaagaaaattccgcttttcctacagaaaaaaaaaaaaatccaaatcccagtgatttaagccagttatagacttagacatatactacggcttttcatgcactttcctcccaattctagagtaggtattttactaggaaaatggtggcagtgcctgttgggaggaagattctttggccaagtgtcttttgttcttgccagggcccctaggctgctggggtgcttcagcttctttagcccagtgtctggtggggaatggcccctgttgcctgtcccacagaggtgggggtgcctcacctggagcctgtccacacattttacacagcacgcttacctggagcatcaggcatcttttccatgctctgtggctcaggaaacacgccttttcaatcatgagtgcaccagtgcttttgggctttttctccccgcttttgtgcaatcctggttgtggatggagttttcctgtctttagtcttctgcatagtacttttctcttctggttcccggttcaaggttttgtaattagagaatgacccagaagcaatggcattttaatgcacagccaaggacttctctgaatttgtatctcaaacctctgtgggtccttcaggcttcagtttgtgatttcatgatttcttgttgctacctaaggaatatgaaaacacccacctccctactctgcatcttccagccgagtggcacctcaggctgtggatcctgtgcttctgtggtgaggataagaatagtgccaaccgtgtggattgaaatcaatcagttaatccctccatgtaaagcacctggaacggatgacagtcttgttatgaatactcaacaaatgctatcatgatttttagttagatttccattgctttaaaacagttgagacatcttggcggtttgagttagagcaacgggccctgaagtgggttctgtttgggtgaagatgattatgcttattccccatggccctctttaggcaagagtgggaagctttctttgtttttttaatcacctcgataggacgttacttcttaaaggtcatccaataaatattaataggccgggcgcggtggctcacgcctgtaatcccagcactttgggaggccgaggcgggcggatcacgaggtcaggagatcgagaccatcccagctaaaacggtgaaaccccgtctctactaaaaatacaaaaaattagccgggcgtagtggcgggcgcctgtagtcccagctacttgggaggctgaggcaggagaatggcgtgaacccgggaggcggagcttgcagtgagccgagatcccgccactgcactccagcctgggcgacagagcaagactccgtctcaaaaaaaaaaaaaaatattaataaagccaactcgttagcgtggggcttaattgcttaagtccaatgagaagtccttctctatcctaggaagttgcccaaactgtagaatctcgtggcctgtgggtaatagccacgtaatacacactcactgcctcaacaaatcatattttagtaggtatgatattctagactcaagacaccattctgtggatcttcccaagggtgtgaagtgtccacagcgtctgccttgggagtttccatgcccaccagaaccatgccccaagcccctcaagcactctgacctaggaaagccagtgaagcaaggatgacaacatggccctttgatactagctgagggacagacacaggtcctgggagaccagagaaagacgaggggcagaggaggtgtcctaaaggaagtctgaggctgaggagccacaggatggcttccagctgtcacaggctgctgctggccttatcacagagagtgggccagagggctgggaaccaaggccagagctcaggttcaggaccattccagcaatcccagcagaaaatggggagaattgtatggtataggcggatatgaaggtagaatctgcaggccttcagtggccaactcagagtctaagtggattccacagttacagcttgagcagctggttgtaggtcatgctttctacactgggcatataggatgtgttttttaaaaagtcctctcttaaccgttgcttgtttagatcctaagtatatcactgcagcctgtgagatggtggcagaaatggtggagtctctgcagtcggtgttggccttgggtcataaaaggaatagcggcgtgccggcgtttctcacgccattgctaaggaacatcatcatcagcctggcccgcctgccccttgtcaacagctacacacgtgtgcccccactggtgagtctgctcgttccttgcagaagaccaagtacggtgaaaggcaccggtaggccctgggctgggcacacgtgagagggcgggacagaatccccgcagcccagaggctgcctgctgtggttctggtgcccactgtggttctggtgccaggctgctttcctcaggcaccacgtgtggaggtcgctagtagaaatactgggttttctaaaatgaactgaggccctacatccctaagagattagtgttagacctgattctagagcaactagaccactttgcttaatagcagaccagaaaccacaccccctcgagtgagtgagattttcctttggagataattcatgtttttctacacagttttgcagttgtcttcagaattggtttaaagtaggtgttattgccaggcgcagtagctcatgcctgtaatcccagcactttgggaagccaaggtgggcggatcacttgaggtcaggatttcgagaccagcctggccaacatggtgaaaccccatctctactaaaaatataaaaattagccaggtgtggtggtgtacgcctgtaatcccagctactcaggagactgagacaggagaatcgcttgaacccaggaggcgaaggttgcagtaagccgagatcgcgccactgcactctagcctgggcaacagagcaagactccgtctcaaaaaaaaaaaaggtaggtgttattgatcagaacccttgtttcagataacatgaggagcttagcttgaggagagtgagggttgatggagggggactgacttctgcccagtgaaatggcatcatctcccaccagcccgctgaaataagatgatggggcctgttccttagggcctgcagcatcctcaggcaggaaagaaaggccgacctggcagggtgtgagccagcaggtgtaggtcagggagaatggagccaggtcccagggaagaggcttgtggctgcctgagaagggtgcgtgcctgcctgtgtgtgtgtgtgcacgtgtgtgtatgtatgctggagagtctagggaggcttgctccaaggacgcagtattgtttgatcctgagagataaggattctgccgcagggaatgaaggtattccagatggcgggcttattccgaagaagaggccagtgcctggcggtgctggaagcagttgcagaacagggagttgtaggctttcctgggaagagagcagcaggggtgctggagaagcaggccacacttgctgcatggggttgctctcggccccactcttggtgcacagcgagtcactgtgggttcattagcatctggttatgagacagtaactgctcctttggaggggctcgtggagaccatgcaggagggcacggtcttgaggtcatgccgtccagagcacacctgaggataggccaggacgggctgcacgctgtaggtaaaattcctccagcaagctcttcactggcattgaggagttccctgagtgcggtcatctggaaggcagctgtaacaggcactgcagtctctccctgggtgggtaccagagaggagcataggggagcataaccgatttaaagagagggctttcctgtggtgaggtaagagattagctggtcattatcatagagccccctctgcctttgtgcagatgggctgtgggaatcctggggttccgttgggtcctttgtcacctcactgaaggcatgtaagctgagctggccagaccgtgagctgatcctgccacttgaacagcatcaagcctgcctctggattcttctgtgcatggcacttgtctgagcacctcacgcacagagaactggacttcagagtttacagaaataagctgtatggttcattttcatgcctgcttgccaataaacatatctgagctgaacctcattgaacgcctgcctttattctagcacagcacctgctgtttgtgggcgaggggtgctgtctctaactcctgcctgcttctcccagcactccctgagtggggtgtgccagcagcctcaggatgaggacaggaagtgggagggcagagcagatttgggagggccacttgatggggaaggaagtcccaggaagcagttggagctgttttctgggggagaaggtgccagctctgggacagtgttggggtagtgaggagggagcccagtggagagaagtcgggcttcctgcttcctcacagtatgtctgtcctgactcaactcggatgatgtcacttccttttcatcttctcaggtgtggaagcttggatggtcacccaaaccgggaggggattttggcacagcattccctgagatccccgtggagttcctccaggaaaaggaagtctttaaggagttcatctaccgcatcaacacactaggtactcttggggcctctccttcaggtcaccattgtcggacatctaccgggaggaaatccagagcccccagtactgggatcttctcatttgactccagaaaagatttaagcatgataataatacaaacctatgtgaatacattttgcagtgttggcaaaactccttttatactgagaaaatagatcccagttcctgtgttttgtggcttgaatcccagctttgtgtattccgggcttgtttgaagtcaggaaaggttcatgtgtagtggacaacgtgagaccaaattctgccttagattttgcatttaggctaaacagtggcagcacttgtctcagaatgttttcttgtgttcaccagtctgatcctgttgtgtctcagtggtccattttctcatatgggaacaagcagacgggagcagatggagtcaggtttcttggcactcgccttccccagagcctagaggcagcatggggagaaagcaggcttggggctcagacagtcctggtctgcttccagccctcctacctgagcagcgcagggcaagtccgtctaacctctagagaccctcagttttgtcatatgtaaaatgggggtcgtgtctatttcatagaattgttgcagatttagaaattacatttctaaacaaatgttaccccttatttctaaataagtgtctaaatgaataagtcaccacttttgcccctatttgatggcaagaggtgtgatcttgtggtgggactgtaatcagtcagttctcagtgactgtgccctgctgtggtgtttcctggaatgttcctgtcttgtcctagaaagtctggcaggggcaccctgactccactgtccagtcctctccccagtccctcgggcttctgcagatttgaggcttgtttggatcccagaaggttgtggcaggagacaccttgcctctactttcccctttataattcaatgtccaaagagagccctgagcaggtacctcacgccagctgcctcacggagctcctcctcttcctggctgtgaggatcggtatcagtggcctcctgctctctcccccttgcctaacacgagcacctttgcttacttgggtgcccttgctcttgaactgcccatcggacgtgcgtgacccaagactgtgccgcagtccttgccttgtctgtgctcattttctttgttcatttttttccctgtaacgtaaattgttatatttgtctgtatctgtgtctgaatcagtcctgcacgctctccttctctctgtctcttgttctttctttaccccgtttatcacggggaccccgatgtccattgctctagttctcctgtcctaagcaccccatcccgtctctctggccttaccacaagtggcgtggctgcctcagacatcatgatggggacatgaagcacagctgtcagaaacaactgttcgttagatacactcgaatgcagctcatcaatagggatggagggtctgtcggatgtattttcactgaatccccgttcctaccttgatacactctttttaatctattcttctagacaggtcagaggaaccattactttgacttttaaatttttagcagctttattgaggtagaattcacatactacagatttcacccactctaagcggacagcttggtggccattagttttatccacagagttgtgcagccagctgcacagtctcagggctggactccagggaagattttagcccatttagtgagtggggcagaagtggccctggccctgcacgaggttgcctgcatgggcgtccctgccctgtccctgtgtctgctccactgggggttgaccaggctgccagggccgacttgggcctgtgccacctgcctctcatgtgtctcggacagtgcagccgatgtctatacttcggtttcctcaatgatgaaatggaggggatagtgttccccgcatcatagaactgtgtgaggtttaagggactcactgcccttggcgtggagccttctccaggggccgtgctgtgtcggcgtagctgtcagctctccgttacaggcttgagaagggttgacactctctcatgtaacatttatatttctaggctggaccagtcgtactcagtttgaagaaacttgggccaccctccttggtgtcctggtgacgcagcccctcgtgatggagcaggaggagagcccaccagaagtaaggccacaccctgtgctggttggcacatgggcagttatggccgcttgcaggcctttggtggggaataaaataaggcagcaagctggtgttctttttttctcttaccttatttttgaaagagtagctgaatggtgtcttgactgatattccagagcagggacaaagcctgctgaggtctgggggctgcgattaccaatggctggaatgcattttattacggtgcattccatgttaaggatcaatacgattgtgccctttctggaaaatatcttttagtttatcaatattcagaggagtgtaggttgaattaaaatgaaaaggcactttataaaggccatgagtagtacctggtttcatttttctaatgtcttgcagagattttatcaggcttcttgaagtgttcacgtacattacgctaacacgatattaataataactgtgctctggtacagcggagccagcagaatgggaagttgtggaatgcaggcccttgattctgatagaaggtgtggtttgaactcacagaaatgacagtttggagggtagacatatgtcacaagtcatcaagattgtctttaaattcatgcatagaagctaacagggtgtcataagcaaggcctgtaaaatgtatgagggaattcaaagataatttattaaaaagtaattcatgtttggagttttgtgcccaaaggagtccttgatttgaaaaatgggcttttgcccatcagattgtttcagggcccgtgtgtgcggaggccctgccttgtgccccgtgagctcagcctgacagaaatcctttggtagcacttaaggctcctcttcctcccattgaggcagggaagactctgggttctgcaggcagaggtggttgtgggtgtcttgctgctcttgttgacatgtgggctctccttccaggaagacacagagaggacccagatcaacgtcctggccgtgcaggccatcacctcactggtgctcagtgcaatgactgtgcctgtggccggcaacccagctgtaagctgcttggagcagcagccccggaacaagcctctgaaagctctcgacaccaggtttgcttgagttcccacgtgtctctgggacatagcaggtgctggggacagtgggttccccgctgaagcgtccagcagcttcaaccaggccgttttccttcattgctagaattgaaaacaccgtccgtgtggcctgtgcaggagatgcagacccaaaggtggcctcctggtcagtgagaagctggaaacgtgacaggaactgacgtggggttattgagcatttaggggaagacgttagcagagcaggaatgagcaggcaactagtagaacacccacttaagggctcacggacaggtgctcacttaggaagtgagtttcatttggtattacaccaggttcctttaggcaaagcggagggaaagttctggtgtttttcacttgtaagattttgaaggaaacaaaacactctttaccttttttctaaaatgtaggtttgggaggaagctgagcattatcagagggattgtggagcaagagattcaagcaatggtttcaaagagagagaatattgccacccatcatttatatcaggcatgggatcctgtcccttctctgtctccggctactacaggtacctgagggaaagggtgcgggggagcggttgtacttgggctagaatgagagaagactggcatgctcaccacaccagtgatgcgggaagacctgagtgtggtctgagttggaggctgtggtgctaaatacgctgcccctttcataagcaggagtcttagtcaggcccagggaggaagtaaaatctggaaatgaatgagaagcattctctcctgccagtcaagaaatgagaagcgaaagaattctcacgggctgtaagaccagcaggatttaaaagttgaattagttgcttatgttaagaactcaaccaagttcatctacacaagctgaatctccagcttttcctaagaaaccatgtgtggcagtggctgcagggcagggcacagctgggcctgagcaccccgctccctgcacctctcccctccctgggccctgcctgtcactgcccactctcccaccaagccttccggttgtgtgcctgccctatcacaggcatcggagcttgtcacctggtttaaaagaagagagttgtgtggggatttgggatgcacgtttttcactcaaaagtattttagcgtagagctctgtgattccgtagctatttaggagtttaagcaccttgaaggctttaattgcagaaagttctatgtggacgtgcaatgtgttatacgcagtgtctatgagactcaaatgtttattagggcgttgaagtaaactgagcacttggagggccatggatccagccttcaaggagctcataagtcaggaggacccaggagcaatgacctgtcatagaaggcagaaaagaggggcacagaggtgggtgggaggcatacacaggcagctcctggagctccaaggggagcaagtgcttccagggaagggggcgtggaggcccctttggaggaggcaagttgatctggggtctggcagagggttagctggggacatttagcgggaggctggtgcccgggaattggggggatgcccagcagaaagacatgaggaggctggcctggggcgtgggggggtgtgaaaggttaagtgggggcattatcctgctcccgctcctgccggctgtatctggtcagcctgggcaccgaggtggggttctggaaggcactgttcaccaaaatgcttatctgggtcccccagagagcttgcctgcctggactgtcggctcgcctgcaactgctgactcctaagcttttgcagctcagcccacaaccagttcctattcacagaggtgggagctgaggggtgacaagtgactgctgcagtcttatttgtcatagagaaaaagtgacagagtccagcttgcccactggccctgccagcttaactggttataaagtgacaaatccccaagacccacagggctctgcacaacctgggccctcctgccagtggcggcgagggcaggtggctcacggctgggtgcctgtctgggcaggagctgggctggtatggggtgggcctgcggccctgcccccctgtgcagatcaagactcagggtgctggtgttcacaggtgccctcatcagccacgagaagctgctgctacagatcaaccccgagcgggagctggggagcatgagctacaaactcggccaggtcagtctcgcgcccccgccgcctggcctctgtccgtttctgtcctcagactttggcgcttgacacacccaggagaaaagctcagtgcactttttaaatgaaaggaagttttccttttttttaaaaaaaaatttaatgttcattgtttttatctgttttattcctaggtcccgcaagcagaggaagcattagttttgtttttatttatgttctgtattccagaaagtagttaagagacctcacatgtagcgatagagatgtgtgtaagagacagtgagagggcgtgacttggacttaagcaaggaccgtgagacacaaaaaggggggtgaggacagagtggagtcagctgaaatgctcaggaggaagtagacgccatgaagggccatggtatggggggccgcaggcgtggccgtgagtgtccctggggccagctcttggggggctccctgagtgtccctgtccctgtggccagttctgggtgggagccccgtgtgcaggcagacagctcggccacttcctagcaggtcacattggtctgtgcttctgtttcctcctcagataagtgaagggattcaagggtctgggtgtggtggctaacacctgtaatctataacattttaggaggctgaggcaggaggcttacctgagctcaggaggttgaggctgcagtgagccatgattgcaccactgcactccagcctgggcaacagaccagtactctgtcccttaaaaaaaaatgtaaacagaaacgtagggccatttgcatatgatggcacatggcgtggagccctacaggtgtatgctgggcggggcccggctgtgctggccgacttgcacctttccctccaccccggtgctgtgtctttcgctcaccgggttcctgatttagtgaaagcagttgtgcaggacagttctctttgtagcttttgtttctgtggaaatgggtcagaatatggtgtttagaaacacttatgagctctgagagtttcctcttctgagttcctggcctgcagccttcacagcagaaaccctgtgatgtcacaagcctgtttctgttccctgctctctgcctgtactgtcctgttttgtgcctgccggtttcagtgacaggaagcagggagctactggaccagcctgtatttttctagacatagttggaaaaagaagtcccactcttctgtcctttcacctttgacagatgtttccaccccaagataagtgaaaatgaccaataggatgcactgtatttttcatgaaagtgtttctgaagggcaggctgagagtgagaggcctggggctcactgggtgcctctggccttgtcctgggcccagggacactggtctgtgcccgaggtattccctatccccccaaccccgctgcatttggccacatccttcaatgtttgcgttgtgtccagcgtccgcaaaccaactgtcatgggatcatactggggctgaagtacggtcccacccctgccctgtctggggctgaagtacagtgccacccctgccctgtctggggctgaaggacagtgccacccctgccctgtctggggctgaagtacagtgccacccctgccctgtctggggctgaaggacagtgccaccccttccctgtctggggctgaaggacagtgccacccctgccctgtctggggctgaaggacagtgccacccctgccctgtctggggctgaaggacagtgccacccctgccctgtctggggctgaaggacagtgccacccctgccctgtctggggctgaaggacagtgccacccctgccctgtctggggctgaaggacagtgccacccctgccctgtctggggctgaaggacagtgccacccctgccctgtctggggctgaaggacagtgccacccctgccctgtctggggctgaaggacagtgccacccctgccctgtctggggctgaaggacagtgccacccctgccctgtctggggctgaaggacagtgccacccctgccctgtctggggctgaaggacagtgccacccctgccctgtctggggctgaaggacagtgccacccctgccctgtctggggctgaaggacagtgccacccctgccctgtctgggatgtttagcccctagatgccactggactgagccgctacttgcttttgggaaagaggggtgggggttaggggtctgggcgaggggagtgcaggggctcctccttggcctgagagctgttcatacagactcctcgcccactccctgcagggtgctgggtcccaggggggaaatggcccttggtgccaagaacgtgagttggggctagtgccagtgatgatggagaacagctttttatgggcacacagcccacagcactgtgccaagtgctcgaggcttcccgagaaccaggcagaaaggaggacagtcgaggtgtgctgactgcgtggtggctgcgtgatctagagcgcgggtcacaaaggcgcgagggagctctggccttgggtttaccgcaatgactgccagtgcgggagactggaaaaggaatctcacgtattggttccgtgttttggggactccattcagatgtcacttaggagtgaaagcatcccttcgtagagcctctttctgtgtcaccctcctcagctgctcctggggttgactggcccctgattcatgcctttagcatgtgctggagcttcccagcagctgtccagcccctgccccaccctctctgtgggctcccttgcccgtaacctggggtgtctgaacgacccttgctaaggggcagactgttagacggtaggcatgtgctgagtcccagtggccacacccacccaccaggagcctggcactgtggccgcagcactgagcagtgccccgtttctgtggcaggtgtccatacactccgtgtggctggggaacagcatcacacccctgagggaggaggaatgggacgaggaagaggaggaggaggccgacgcccctgcaccttcgtcaccacccacgtctccagtcaactccaggttttccaatggcctttttctttttaacagaaatttgaaatttcttatcagtcatttgatttgtttgaggtgcttcttgaaatgagcctctcatctcatgtacttggaaaatacccatctcgcatattccacaggaaacaccgggctggagttgacatccactcctgttcgcagtttttgcttgagttgtacagccgctggatcctgccgtccagctcagccaggaggaccccggccatcctgatcagtgaggtggtcagatccgtaagtgagccttcccattcccctcacacctgcacgtgccacacgcaccacacacgccacacaccccacacacacacaccgcccacacacatgccacttgcacacacacccctcatgcatgcaacacacacacaggccacacgcaccatagacaccacacacacatgccacatgcacacacatacacggcatgcaccatacacacaacacacacagcacacatgccacacacacacgccacaccacatgcaccacacacatgccacatgcacacacactccacatgcatgcaccacacacacacacacacaccacacacaccacatgcaccacaccacacaggttacatgcacacaacacacacatgccacgtgcacacaccccacacaccacatgtatgtgccacacacagcacacaaccacacacatgcaccacacacatgccacatgtgcatgcaccagacacatggcacacactacacacacgccacgtgcacacaccccacacacatgtacgcaccacacacatgccacacacacatgcaccacacacatgccacatgtacacacatgtatatacacaccccacaccacacacacaccacttgcacaccacgcacacacaccacatgcgcacacacacaccacatacgccacatgtacacaccatacacacaccatacatgcaccacgtgtaccacgcacccacacagacacagcacacgcatacaccacacacacacgcacacatgcgtcccgcacagtaatgtctcttgggtgtaagaacacgacttgccagtagtagcgttctggatgcgttgcctggattctaacagcgcgattctccccttgccctcctggttttccacatctccagcttctagtggtctcagacttgttcaccgagcgcaaccagtttgagctgatgtatgtgacgctgacagaactgcgaagggtgcacccttcagaagacgagatcctcgctcagtacctggtgcctgccacctgcaaggcagctgccgtccttgggatggtaagtgacaggtggcacagaggtttctgtgctgaagccacgggggcccatctgccttgggacctggtgttggccagaggtgccgggtgcggctgcctccttccaagagttgacccgaaccggactccacggcccacgtgagctgcagtgcttctcagatggagggggttcagcgacggtcagtgccattcacaggtcactgtgatgtgggttgtggcggccaagccatggtttggggtcccgtatccctgggcttatgacatcattgtagtagcccatccccacagaaccacggtgtgtggtggcgctgaggcatcgtagatggtggaaatgctactggcttccccatgctctgccctgaggcctgactgcctcactccccttctcagttatgttccaggccccccgagcttcctggctggacagcttctctcctgggggccgttttgtcacagtgaccctgtgtttctagtcccaaatctgggtgctatagtctctttttagcgtggtggttgtcttagtcttttttggctgctaccacaagttaccttagactgggtaatttataaacagtggaaatttacttctcaccgttctgggggctggaagttttcatggtcaaggtgccagcagatttggtgtgtgatgagggctgctctctgcttcatagatggcatcttctggctgggtcctcacggtggaaggagtgaacaagctccctcaggccttttagaagggccccaatccacaagggctctcccatcatgacctcatcacctcccaaggccccaccttcttgtactgtggcactgcaaattaggtgtcagtgtaggagtttcaggagggatagaaacattcagaccatcccagcggtcaagtgttcatcctcttgagttcctccttattctgcttctggtttatcaggattcagccagtgcagcatggtacctgtattctgtggcacatcaccacatggtatttgccaagtatccatcacctgcacacgtgaaatcattgcccgtgggtcccgacatctggcgaagcatattcaaggatggcagaactgtcagagctggcacctctggttccttgtcatgtggcattacctagtaatccattttatgatagcaatggaaactcatttcttcaacaaacacctgagtggctgccgtgtgccagccgtctggggcccttggtgagaatggcatggtggtgcccatcagggcctgcctagcccgtgctctggacgggctcctgtgtgtcaggaacgacaatgctgtcatgacggtgaatgatttttttttttgccatcactccagccgctaacatttgcggagctcttcctcccgcacccccacctgacaaggccaagggtgaccttggccccaccctaggcggccaaggtcagaggttagctggcttgtctgggtcacacaaaatgcagcagaggttgaggtgagcacatgtccgtgacctggagcctgactccctctctgcgagtcttgactgctcttgcctagactctgtcctccccgagcccaaacgccagtcatcttcccttgtgggtgtccttcagcctggtgccatgctggtgactcagcagccgtccagggagtggaaacaattgagtgtgtgggttccctgtgtgggcatctctcttcacggcgaacaccctctgggtgttgcccacacgatgtcaaagcggctcttggaaggggtccttctcctttgtgggaagtttcagctgctgggctaacttgaattgtaactgtggttttgtgctcaggcccagatccccctaggcaagtgttgtgccatcagtaatcaaatgagaaataatcattttgaaaagcagatcctaaggcaggatggtcatggacactcactcccagctctttgtgcactcatgctttctggaagatggccatcctctgtgaaggttttcagcgcgtcatgcttggtacccacgtatccagagcatgtcgttttgaggtatttgcccaccgttgtgaaatccgtgccacccgagagcaggtcctgatgtggggctttcagaagtgggacctggggccgtacgcagtccttagggaggggccgtgtggcgttgtgcgtgtgaggggatagcacagggtgaggtgggggcccaagaaggaagtgacccacaaagaacagcctcctcttttggtccttgttcctgggatggctgggagtggcttctgtgtcgtccggccatttcccctgcggagaggctcctaccactgccgagaacctcatcattccacaaaaacaagaggccgcctggccatccagcgctccatgggaattctgtgtccccatagtcttgggctgaaggagggtgacattccttgctgacttctgcaggggtctcctcactgttaaagagcagattgaaagtgaagaacgtgggctaagtgtttaggtcgatatttaaccctgctaggttttggatactaagtgaaattgaggccattttggttgaagttgacagaaaccactatcagggatccccaagactaccccaggcttttctagaaagactctcagctaagatgtgttatggtaaaagcacacaaaacaaaatcagcaaagaaaattagcaagggcagaggcccatggggcgatgtcccgaggacaccaggcttgagcttccagaatcctctcccagcggggtcgtgcaggacgcacttaactccccgcacagtgagccgtgacagcgcgtgtgcagtgtcgtcgccaggaaagcacactagagactcggtgccagggtttttactgggggctgggcacatgggcaccctctgcctgcctcgtgcccagactctggactcccggagggaaggcaagttctcagcaccaaccctggtgcccacacaagcagctgagcacagggagcccctcctcagtgaggatggtgggcaccgtcccaacaccagccaggggccagccttgcacacaggcctctcaggatggtctccggcctgctgtgtagtctcttctgcacacaagcgtgagggcagcgcccccgcctcggctgtggggaggagccactgggacgtgagctctggtggcatgcagcagcttttgtctgtgtgtgcctaggacaaggccgtggcggagcctgtcagccgcctgctggagagcacgctcaggagcagccacctgcccagcagggttggagccctgcacggcgtcctctatgtgctggagtgcgacctgctggacgacactgccaagcagctcatcccggtcatcagcgactatctcctctccaacctgaaagggatcgcccagtgagtgggagcctggctggggctggggcgggggtctcagaatgagctgtgaaggaagcagcatcaccctctccaagtgcccaggctcctggccagatggcaggccaggtatcagtgggaacccaggtgggtgccatggctgaggtcagtgagacgcaagagcacaggtgcgtcctagaggcttcctcgggcacctccagcgagctggagctctcgcctctgctgctgtctcatgtggcgcttagcacactctcccacgtgcccattcctgactctgctctcgaggccatcggctctcattctctgctcccagaaccctgttattacccaggctagcctcctctctgcaccttccccgccctggcccagtacctccctcttgtttccactgtgattccgacctcaccttatcttaaagctgctggacggcaggttctgtacacacgtgtccttgacaaagcacggctggtgccgcaacccctcagcgagcaagtcaagctcttcacagcgatgtcttacaagcgcagagggctctgtgacaccctggtctcaccgccactcttccaaagtcgcagaggctttagcagagatgggcccagcctctctgagtcataggcttctgcacacgggagctgtctttagagggagggtggaatttcatcagccacccacatgggggagttgagggcaagaattaggagcaaagatgggaaggggtctgggaggaatggccagtgatcccctttgacaagtgggcaggaaacgggggctaggtcaaagttgagtggaagacctggagggagacgggaaggtctctgtaggcacagttcagacaggagggaggtgtgagccagggcacatgccggtggccgtctggcaggatttgggacatgctggagcagggacagcggctcatcaggggccattgccctcatccaggccagagtgtcacaagcccgtggggaggcccttctcgcctgtcatccttgctgggcagtgggtgctgtgctagcaggacaggcggacggctggcaactgtctctgcatccctggagcctggcatagggccaagtcacacggggcacaggcctgcaaatcaggcacatatgttggtgcagtgacgtgattttggggggcagccccagaacaggccccagacacaggccaaagccctgcctgtgctggtgtgttgggctgttctatggctcttgctgtgggcatggaggactcagggaaggagagttgaggtggtccaggagttgcgtttgggatgcagagagcttgtggcatccaggtagaaatggtgcgtggggctgacctcagcaccatgggcagaggggccgtgtcacgtgcctccgaggtggaggtgggaccacgtggtgacagatatacgcatcactgggcacgtttttgtgggtgttggggggcatcgtattggctcctctgttcacagtggccactcattcagtccctggctaccaggtcctcactgtgccatggggaaggccggcgctgtcgggggatcacagaaggcagcacgtcatgatggcatgtgccatgaaggaaaagcacagggcactcaggaagtagaggggactggcctggggtgtgggaatctagggcctcgttgagggacagagagaggaagtgtgtggtggccagcatggaggtggccacaggggaggctgagttaggccgagagggcagggcgttggggaggtagacgggctcagccactcagggagtggtcaagcagaggctgaagggtcaggccaggttgcaggggcctgggggagccactcagggtaggcgctcccgggagcccgcctggcccatagctctacactcccgcgtggggccggacatgctgtgaagccctctccacgttggatgggggtggctgagcctggatgctgtctcccgttttcagctgcgtgaacattcacagccagcagcacgtactggtcatgtgtgccactgcgttttacctcattgagaactatcctctggacgtagggccggaattttcagcatcaataatacaggtgagtgggccctggctgtcttcctctgcacacggggagtgggcttcccttctcttttccttgcaggatcataccagtgggccagttttgacttggtcgggaggaggcatgaacacctgagactgtgcagcgattctttgacacagaggcctttctccctgtgcagatgtgtggggtgatgctgtctggaagtgaggagtccaccccctccatcatttaccactgtgccctcagaggcctggagcgcctcctgctctctgagcagctctcccgcctggatgcagaatcgctggtcaagctgagtgtggacagagtgaacgtgcacagcccgcaccgggccatggcggctctgggcctgatgctcacctgcatgtacacaggtgagcatgtacacggtgcccataaggccagcccaagtcctgttcaagggaggcaggagcatgctcactcaagggacctcgactaggtgccctctgatttcacacttctggtgttgccccaagccggccccatcaccttgcaagaaaggctctggagcccccagggctggagtacctggtcagggttgaccgtccctgtggtcactcatcccatgtggctgagctgggctgggtcctgggcaagcaaggggctgatatcacctgctttcagatctccagggactcactggacccctgtgtacaaagcactgtctacagagcctattgggttgtatagaggtaaccttcgtactgaacacttttgttacaggaaaggagaaagtcagtccgggtagaacttcagaccctaatcctgcagcccccgacagcgagtcagtgattgttgctatggagcgggtatctgttctttttgataggtaagaagcgaagccccatccctcagccgttagcttccctagaactttggcctgaagctgtgcttttgtgtgtgtctgctgatcccctggcgctgttgctggagtcctgccagtgattccccaccacagcctgaccatgggctgccttggctcagggttccactggcgagctggtggtccttggaccccagcactcaggtgtagcgttgaccagttccaaggttgtcccagtgcctgcccatctctcctgagggctcagggacagtacctggcagttgggggtgtggcagggggcaggaatgaccagcctctgggagggtggggcagaagcctgtacagtgaggaggagctggctcagcctggctgcctatcgtgagaggggagcccacggggctgtgggaggggggccgtggtgcctgtgagcagggtgaggagcagcggcaggaggatgaaggtggaacccacacatgcatctttgagacccgtgtggtcagtggcttctgccccccaccaccccccactgctgtgcgtgcatagaattggcttccctcacctgctctggaagtgggttaggagcttggtagggctttttctcaaggacaagggcccctgatttgctctcaggcctcagtcctggcgacatggtggatctggagccttgttgcactgccttgcctgtgctctccaatcagggtggccagtggggagccatttggcttttctcaagagcatactcaggtggaccttgctccactgtttgaccagatgaggcattctgaacagccaagcctgtgctggtctgttttcatgttgatttttttttttcttttctttttgagatggagtttttcccttgtcacccaggctggagtgcaatggtgtgatctcggctcactgcaacctccgcctcccgggttcaagtgattctcctgcctcagcctccctagtagctgggattacaggcacacaccaccatgcccagctaatttttgtgtttttagtagagacggggtttcaccgtgttggctgggctggtctcgaactcctgaactcaagtgatccaccctccttggcctcccaaagtgctgggattgcaggcgtgagccactgcgcccggcccccatgtcgatttttaaatgcacctctgcatcgttcttcagtccccatatgctcactgagcaccactgcgactggcagacgggcacagggaggcgccacgaccagtcctggccttcaaggggcttgtggtctagtgggcccaatgctaggtggcgagtgctccaaagagtgtggtgcacgccttccgcttgaccgctctccagacgccacagggaggcacctcgcagctgaccacagatttctctctgtggagcagtgtcttcagagcggctgccatgccactgctgggcgagggtctgcgggcgggtagagccaggagcacctgtgaggaagtgcactgccattttcgtagctgcttcccgtgtgtctcagttacacacggctggcatgtgtgcactgatgagacgggaacgtgatggttgcttttcagcactgaaagggatactgctcagggggcgtgtttcaggatctggttagggaagaagcagcgagagcacagatggggccctgtgtggtaacaagaaaaaagtcctggttgacaacagtgccacgaagcgttagaacacatagggatgtttgtggagcatttgcatgtggaaagcagcaaaaacataatgggaacgggttcttttgttatgatttttaaaaatctcttttgtaacatccttcccgctgcgccgtttctgcatattcctttatgtagctttcaaactcctcttaggagttctggtccctacagggcgtgggagcccaggctttacgtagctttcaaactcctcttaggagttctggtccctacagggtgtgggagcccagggcctgtgccgagcagcctgcctccacgagctagacagaggaagggctggggttttgcctttttagtctcaaaattcgtactccagttgcttaggctctgactttccccacttggaaagtccctcacggccgagggtccctcccagccctgatttcacatcggcattttccccagtattagagccaaggccctccgcgggcaggtggggcagctgtgggagctggtgccagtctctgacctgcgtccctcctcccaggatcaggaaaggctttccttgtgaagccagagtggtggccaggatcctgccccagtttctagacgacttcttcccaccccaggacatcatgaacaaagtcatcggagagtttctgtccaaccagcagccatacccccagttcatggccaccgtggtgtataaggtgaggttgcatgtgggatggggatggagtgggaaagcctggaggtggagttgcctccgacttcccagcagattcgccagcagagcccagctcctccgctttaaagcagcaatgcctctggcccccaccccacccccgccacccaggcgcagcaggtgcttcccgtccccccagccctgacactcaggcacctgcttgctccttgcaggtgtttcagactctgcacagcaccgggcagtcgtccatggtccgggactgggtcatgctgtccctctccaacttcacgcagagggccccggtcgccatggccacgtggagcctctcctgcttctttgtcagcgcgtccaccagcccgtgggtcgcggcgatgtatcctctctgggtccctggtgctggccccgtttcccttgtcaacaccgaggctcatgtttcatgataaggttttgaaacctaacctttgcaaaaaccccacagatgccagggtgacaggccctcagccccagggaagtaaaatgctgacaggggtacagaaaggagcacgtccagacatttgctgaccagggcctctcagaggggccggtgtatggcaggagggtcgcagctgaggggcctttctgtggagggcctgggtgaggggagcgagggtgggcggtggtctctgcagacgtcccgcccactcgcgggctctgtgtggctgggcttctcctgacactgcttctcattagctttggtcattgtgcctcgatcgccctctcggggaaaggcttaagtaaagatccagttcccacccccagatgctggctgccaggagtttccctttccacagcccttccccaagacagaccacaagagcctccaagcagcacagttgtcctggtgctgacagcacagccttgcccggcgtgcctggcacggctctgccctcactgcattggagcagggctagtggaggccagcggaagcaccggccaccagcgctgcacaggagccaggccaggtgagtgctgccgagtgggtgccctgcctgcagggcatccagccagccaagggttgcaggaatggaggtggaggcgctgatgcagctggaggcatccaggtggcccttccggggctctgctcgctctccaggctccctggacccctttgtagactgtttcaggagaggaactcccaggtgaggacagggaggcagcattcccctcatttgccggcctttttccttaactcctgcaccagcctcccacatgtcatcagcaggatgggcaagctggagcaggtggacgtgaaccttttctgcctggtcgccacagacttctacagacaccagatagaggaggagctcgaccgcagggccttccagtctgtgcttgaggtggttgcagccccaggaagcccatatcaccggctgctgacttgtttacgaaatgtccacaaggtcaccacctgctgagcgccatggtgggagagactgtgaggcggcagctggggccggagcctttggaagtctgcgcccttgtgccctgcctccaccgagccagcttggtccctatgggcttccgcacatgccgcgggcggccaggcaacgtgcgtgtctctgccatgtggcagaagtgctctttgtggcagtggccaggcagggagtgtctgcagtcctggtggggctgagcctgaggccttccagaaagcaggagcagctgtgctgcaccccatgtgggtgaccaggtcctttctcctgatagtcacctgctggttgttgccaggttgcagctgctcttgcatctgggccagaagtcctccctcctgcaggctggctgttggcccctctgctgtcctgcagtagaaggtgccgtgagcaggctttgggaacactggcctgggtctccctggtggggtgtgcatgccacgccccgtgtctggatgcacagatgccatggcctgtgctgggccagtggctgggggtgctagacacccggcaccattctcccttctctcttttcttctcaggatttaaaatttaattatatcagtaaagagattaattttaacgtaactctttctatgcccgtgtaaagtatgtgaatcgcaaggcctgtgctgcatgcgacagcgtccggggtggtggacagggcccccggccacgctccctctcctgtagccactggcatagccctcctgagcacccgctgacatttccgttgtacatgttcctgtttatgcattcacaaggtgactgggatgtagagaggcgttagtgggcaggtggccacagcaggactgaggacaggcccccattatcctaggggtgcgctcacctgcagcccctcctcctcgggcacagacgactgtcgttctccacccaccagtcagggacagcagcctccctgtcactcagctgagaaggccagccctccctggctgtgagcagcctccactgtgtccagagacatgggcctcccactcctgttccttgctagccctggggtggcgtctgcctaggagctggctggcaggtgttgggacctgctgctccatggatgcatgccctaagagtgtcactgagctgtgttttgtctgagcctctctcggtcaacagcaaagcttggtgtcttggcactgttagtgacagagcccagcatcccttctgcccccgttccagctgacatcttgcacggtgaccccttttagtcaggagagtgcagatctgtgctcatcggagactgccccacggccctgtcagagccgccactcctatccccaggccaggtccctggaccagcctcctgtttgcaggcccagaggagccaagtcattaaaatggaagtggattctggatggccgggctgctgctgatgtaggagctggatttgggagctctgcttgccgactggctgtgagacgaggcaggggctctgcttcctcagccctagaggcgagccaggcaaggttggcgactgtcatgtggcttggtttggtcatgcccgtcgatgttttgggtattgaatgtggtaagtggaggaaatgttggaactctgtgcaggtgctgccttgagacccccaagcttccacctgtccctctcctatgtggcagctggggagcagctgagatgtggacttgtatgctgcccacatacgtgagggggagctgaaagggagcccctcctctgagcagcctctgccaggcctgtatgaggcttttcccaccagctcccaacagaggcctcccccagccaggaccacctcgtcctcgtggcggggcagcaggagcggtagaaaggggtccgatgtttgaggaggcccttaagggaagctactgaattataacacgtaagaaaatcaccattccgtattggttgggggctcctgtttctcatcctagctttttcctggaaagcccgctagaaggtttgggaacgaggggaaagttctcagaactgttggctgctccccacccgcctcccgcctcccccgcaggttatgtcagcagctctgagacagcagtatcacaggccagatgttgttcctggctagatgtttacatttgtaagaaataacactgtgaatgtaaaacagagccattcccttggaatgcatatcgctgggctcaacatagagtttgtcttcctcttgtttacgacgtgatctaaaccagtccttagcaaggggctcagaacaccccgctctggcagtaggtgtcccccacccccaaagacctgcctgtgtgctccggagatgaatatgagctcattagtaaaaatgacttcacccacgcatatacataaagtatccatgcatgtgcatatagacacatctataattttacacacacacctctcaagacggagatgcatggcctctaagagtgcccgtgtcggttcttcctggaagttgactttccttagacccgccaggtcaagttagccgcgtgacggacatccaggcgtgggacgtggtcagggcagggctcattcattgcccactaggatcccactggcgaagatggtctccatatcagctctctgcagaagggaggaagactttatcatgttcctaaaaatctgtggcaagcacccatcgtattatccaaattttgttgcaaatgtgattaatttggttgtcaagttttgggggtgggctgtggggagattgcttttgttttcctgctggtaatatcgggaaagattttaatgaaaccagggtagaattgtttggcaatgcactgaagcgtgtttctttcccaaaatgtgcctcccttccgctgcgggcccagctgagtctatgtaggtgatgtttccagctgccaagtgctctttgttactgtccaccctcatttctgccagcgcatgtgtcctttcaaggggaaaatgtgaagctgaaccccctccagacacccagaatgtagcatctgagaaggccctgtgccctaaaggacacccctcgcccccatcttcatggagggggtcatttcagagccctcggagccaatgaacagctcctcctcttggagctgagatgagccccacgtggagctcgggacggatagtagacagcaataactcggtgtgtggccgcctggcaggtggaacttcctcccgttgcggggtggagtgaggttagttctgtgtgtctggtgggtggagtcaggcttctcttgctacctgtgagcatccttcccagcagacatcctcatcgggctttgtccctcccccgcttcctccctctgcggggaggacccgggaccacagctgctggccagggtagacttggagctgtcctccagaggggtcacgtgtaggagtgagaagaaggaagatcttgagagctgctgagggaccttggagagctcaggatggctcagacgaggacactcgcttgccgggcctgggcctcctgggaaggagggagctgctcagaatgccgcatgacaactgaaggcaacctggaaggttcaggggccgctcttcccccatgtgcctgtcacgctctggtgcagtcaaaggaacgccttcccctcagttgtttctaagagcagagtctcccgctgcaatctgggtggtaactgccagccttggaggatcgtggccaacgtggacctgcctacggagggtgggctctgacccaagtggggcctccttgtccaggtctcactgctttgcaccgtggtcagagggactgtcagctgagcttgagctcccctggagccagcagggctgtgatgggcgagtcccggagccccacccagacctgaatgcttctgagagcaaagggaaggactgacgagagatgtatatttaattttttaactgctgcaaacattgtacatccaaattaaaggaaaaaaatggaaaccatcagttgttgctgtgtgaggcttgctttgcttcatgagaacctagaccttgctgagctggagtcttaggaagcagtctcctaagtgcttctccagcaggggcagaaactgtcccaccagctaacatctggcattatggagggtcccccaggcagctgccagcagggacaggccccgtgttttctgtagccagggatgaggaagtggccccagggcatgggcctggctgggtgcttctgcaagggccttcccaaaccacagtacaggtggtcttcctgccctgcagatgggagctgtgggagctgctggagctgctggagccttcatggtcaagtgacatcataagcttatatgacatacacaagcctcaggacttggcccatggcactgaagcaggtcatcaggcccagcacagagactagagctgtgttctcacagggcccaccacccttccacctccttggccattgacacctgcgtccctggcccagctgctcccaggtaacccccaaagcagctggcacatcccacctctggtgtggccggggctgctgtgtgtccgcagggcctgccccgtctattctagcttgtttgtcctgtctgaaccagcgcctactccaagaagcctctgctcagcccagcggggatgcttctaagctccggacgagcctctcggaagccttggtgattggtggtgtagtcatcttgggatgcagatgtcttaccaacctgcaagaacaaaaaccctgtggcttcctctggtgcagggtatttagtcaatgtttgctgaggtcccgtctggttctggctaattggcaggggtcgtccacccattctttccctgctctgctgtctgtgccaggagagacgggggccagtcggccaaggggccagctcctgctgcctgctcctcttgggcacgtgcgggggccccctttctctgagcagggatagggatcagtctgccggagggatgtggtggacaggcctaaagcatttggggcggggcatgccacttgagctccctaaatctgtctcctcataggtgacaccgctccagggccccccagtggcctctcctttcagagctacctaaattctggtcacttcagagaaatggagcacccccttctccctggtccaggtgtggacagcctggcacactgagcacacctggcatggctggtaatttcagaaagaagaggggccggggtccagtgggaagcagcggtgaacccctcgtgagtgggctttgcagtccctccccatgccacggcagagctgccctcaacacagccttcctcttcctcatcggagagcacaccctgtccccttgccgagctgtgccctgtgccttcggtggtatttgattttggctgctactggctttgttgggatctggaagtcgcttcccctgcgtggtgcgtggagcactgtaagtcagatgagggaagtagccagggtgaggtgagtaccgggtggagccgccactgaagggactgggtaggggggccttgcctctacatgatgtgacacagccaaccgaggacagaggaagccccgttcctgggggtgtggggtgcacccctcagggaagcctgcagtggggcctgaggaaaggcatcctccgcgagcccacgagtctggtccatgagcaccgtgacagtgtctgtgggtagaggtggacccggccttgtgtcatcaccaggacctcttttgggaaaccatgtggacatcgcttgcgggtcccccaggctctgcagccccagcagcctggctgccttttgggcaagtggcttgagccacagaggacccagtcctgttgcagccacatcctctgggggggcccgccagtgtggccggctttctccaccctacaccaggcctccaggtgtcctggtcgggggtgtctgggccctgggtgggccctgtggacctgtgaggtcagggtcagggcatcactggaggcagagggctgaagttgtgggtctgggttccccttgtgtgcacaggcccctgccctccatgcttggtcaggcagctacccccaaaactgctaggacaggctggtcctgaggtggatcctggcccctgtaccctctggacagcccacccgcccaaccttctaccctgccccagcggcggcagtgttggccacatccttcccctcctggccccaattgctctggggaagtccaggctccggagcctgcccaggggccccccgtgatttgggcccaggactccacgtggttctctgccttcacccaagccctgaactcctcagctgccaaatccccacccatctgcacaggctgtgctcaccactgctgctcctggaaggtgcccctcagtgggacgcccacctcctctctgggcttctgtgtttgggagccctgctgcccccacccttggtcagtccccatgtcctgctggcctgtcaggcagggcagaaaatccacccagaaatgctgagcaggatgagagtctagttgggcccagcctcattatttagaagggatggaggcctagggagcatgcttctagcctgagcccagcagggccccgcccatgtcccaggtctgcaccagggacagctcctgccgaggcctgacctgccccttctccctcaggtgctgctggttgaccagcctctggccctaggagaccccgtagcgactgagggtcccagcaggccatgcagctttgccaaggtacgagcccctccccagcaggggacagatgtggggaccctcccaggcaggagcagctgggtgcctggtgctgccatctgctgcctgcctggttcttgtcctcacattggaggtcagtgtgagggctctgcctcgggaaaggccatggagcttgccctgtccagggcctcccatgtgcactgagcctgggaagagagggttggagttgagccttttaccctgggaatgctgcctggaggatggtgcgggtgtggggtggcaccctgccaggcagggccctgcctccctgcgcccactggaactcgggcaggcaggggtgtaggtgcctcc

SEQ ID NO: 115 - RNA, 13498 nt, Homo sapiens
  source 1..13498: mol_type = mRNA
gctgccgggacgggtccaagatggacggccgctcaggttctgcttttacctgcggcccagagccccattcattgccccggtgctgagcggcgccgcgagtcggcccgaggcctccggggactgccgtgccgggcgggagaccgccatggcgaccctggaaaagctgatgaaggccttcgagtccctcaagtccttccagcagcagcagcagcagcagcagcagcagcagcagcagcagcagcagcagcagcagcagcagcaacagccgccaccgccgccgccgccgccgccgcctcctcagcttcctcagccgccgccgcaggcacagccgctgctgcctcagccgcagccgcccccgccgccgcccccgccgccacccggcccggctgtggctgaggagccgctgcaccgaccaaagaaagaactttcagctaccaagaaagaccgtgtgaatcattgtctgacaatatgtgaaaacatagtggcacagtctgtcagaaattctccagaatttcagaaacttctgggcatcgctatggaactttttctgctgtgcagtgatgacgcagagtcagatgtcaggatggtggctgacgaatgcctcaacaaagttatcaaagctttgatggattctaatcttccaaggttacagctcgagctctataaggaaattaaaaagaatggtgcccctcggagtttgcgtgctgccctgtggaggtttgctgagctggctcacctggttcggcctcagaaatgcaggccttacctggtgaaccttctgccgtgcctgactcgaacaagcaagagacccgaagaatcagtccaggagaccttggctgcagctgttcccaaaattatggcttcttttggcaattttgcaaatgacaatgaaattaaggttttgttaaaggccttcatagcgaacctgaagtcaagctcccccaccattcggcggacagcggctggatcagcagtgagcatctgccagcactcaagaaggacacaatatttctatagttggctactaaatgtgctcttaggcttactcgttcctgtcgaggatgaacactccactctgctgattcttggcgtgctgctcaccctgaggtatttggtgcccttgctgcagcagcaggtcaaggacacaagcctgaaaggcagcttcggagtgacaaggaaagaaatggaagtctctccttctgcagagcagcttgtccaggtttatgaactgacgttacatcatacacagcaccaagaccacaatgttgtgaccggagccctggagctgttgcagcagctcttcagaacgcctccacccgagcttctgcaaaccctgaccgcagtcgggggcattgggcagctcaccgctgctaaggaggagtctggtggccgaagccgtagtgggagtattgtggaacttatagctggagggggttcctcatgcagccctgtcctttcaagaaaacaaaaaggcaaagtgctcttaggagaagaagaagccttggaggatgactctgaatcgagatcggatgtcagcagctctgccttaacagcctcagtgaaggatgagatcagtggagagctggctgcttcttcaggggtttccactccagggtcagcaggtcatgacatcatcacagaacagccacggtcacagcacacactgcaggcggactcagtggatctggccagctgtgacttgacaagctctgccactgatggggatgaggaggatatcttgagccacagctccagccaggtcagcgccgtcccatctgaccctgccatggacctgaatgatgggacccaggcctcgtcgcccatcagcgacagctcccagaccaccaccgaagggcctgattcagctgttaccccttcagacagttctgaaattgtgttagacggtaccgacaaccagtatttgggcctgcagattggacagccccaggatgaagatgaggaagccacaggtattcttcctgatgaagcctcggaggccttcaggaactcttccatggcccttcaacaggcacatttattgaaaaacatgagtcactgcaggcagccttctgacagcagtgttgataaatttgtgttgagagatgaagctactgaaccgggtgatcaagaaaacaagccttgccgcatcaaaggtgacattggacagtccactgatgatgactctgcacctcttgtccattgtgtccgccttttatctgcttcgtttttgctaacagggggaaaaaatgtgctggttccggacagggatgtgagggtcagcgtgaaggccctggccctcagctgtgtgggagcagctgtggccctccacccggaatctttcttcagcaaactctataaagttcctcttgacaccacggaataccctgaggaacagtatgtctcagacatcttgaactacatcgatcatggagacccacaggttcgaggagccactgccattctctgtgggaccctcatctgctccatcctcagcaggtcccgcttccacgtgggagattggatgggcaccattagaaccctcacaggaaatacattttctttggcggattgcattcctttgctgcggaaaacactgaaggatgagtcttctgttacttgcaagttagcttgtacagctgtgaggaactgtgtcatgagtctctgcagcagcagctacagtgagttaggactgcagctgatcatcgatgtgctgactctgaggaacagttcctattggctggtgaggacagagcttctggaaacccttgcagagattgacttcaggctggtgagctttttggaggcaaaagcagaaaacttacacagaggggctcatcattatacagggcttttaaaactgcaagaacgagtgctcaataatgttgtcatccatttgcttggagatgaagaccccagggtgcgacatgttgccgcagcatcactaattaggcttgtcccaaagctgttttataaatgtgaccaaggacaagctgatccagtagtggccgtggcaagagatcaaagcagtgtttacctgaaacttctcatgcatgagacgcagcctccatctcatttctccgtcagcacaataaccagaatatatagaggctataacctactaccaagcataacagacgtcactatggaaaataacctttcaagagttattgcagcagtttctcatgaactaatcacatcaaccaccagagcactcacatttggatgctgtgaagctttgtgtcttctttccactgccttcccagtttgcatttggagtttaggttggcactgtggagtgcctccactgagtgcctcagatgagtctaggaagagctgtaccgttgggatggccacaatgattctgaccctgctctcgtcagcttggttcccattggatctctcagcccatcaagatgctttgattttggccggaaacttgcttgcagccagtgctcccaaatctctgagaagttcatgggcctctgaagaagaagccaacccagcagccaccaagcaagaggaggtctggccagccctgggggaccgggccctggtgcccatggtggagcagctcttctctcacctgctgaaggtgattaacatttgtgcccacgtcctggatgacgtggctcctggacccgcaataaaggcagccttgccttctctaacaaaccccccttctctaagtcccatccgacgaaaggggaaggagaaagaaccaggagaacaagcatctgtaccgttgagtcccaagaaaggcagtgaggccagtgcagcttctagacaatctgatacctcaggtcctgttacaacaagtaaatcctcatcactggggagtttctatcatcttccttcatacctcaaactgcatgatgtcctgaaagctacacacgctaactacaaggtcacgctggatcttcagaacagcacggaaaagtttggagggtttctccgctcagccttggatgttctttctcagatactagagctggccacactgcaggacattgggaagtgtgttgaagagatcctaggatacctgaaatcctgctttagtcgagaaccaatgatggcaactgtttgtgttcaacaattgttgaagactctctttggcacaaacttggcctcccagtttgatggcttatcttccaaccccagcaagtcacaaggccgagcacagcgccttggctcctccagtgtgaggccaggcttgtaccactactgcttcatggccccgtacacccacttcacccaggccctcgctgacgccagcctgaggaacatggtgcaggcggagcaggagaacgacacctcgggatggtttgatgtcctccagaaagtgtctacccagttgaagacaaacctcacgagtgtcacaaagaaccgtgcagataagaatgctattcataatcacattcgtttgtttgaacctcttgttataaaagctttaaaacagtacacgactacaacatgtgtgcagttacagaagcaggttttagatttgctggcgcagctggttcagttacgggttaattactgtcttctggattcagatcaggtgtttattggctttgtattgaaacagtttgaatacattgaagtgggccagttcagggaatcagaggcaatcattccaaacatctttttcttcttggtattactatcttatgaacgctatcattcaaaacagatcattggaattcctaaaatcattcagctctgtgatggcatcatggccagtggaaggaaggctgtgacacatgccataccggctctgcagcccatagtccacgacctctttgtattaagaggaacaaataaagctgatgcaggaaaagagcttgaaacccaaaaagaggtggtggtgtcaatgttactgagactcatccagtaccatcaggtgttggagatgttcattcttgtcctgcagcagtgccacaaggagaatgaagacaagtggaagcgactgtctcgacagatagctgacatcatcctcccaatgttagccaaacagcagatgcacattgactctcatgaagcccttggagtgttaaatacattatttgagattttggccccttcctccctccgtccggtagacatgcttttacggagtatgttcgtcactccaaacacaatggcgtccgtgagcactgttcaactgtggatatcgggaattctggccattttgagggttctgatttcccagtcaactgaagatattgttctttctcgtattcaggagctctccttctctccgtatttaatctcctgtacagtaattaataggttaagagatggggacagtacttcaacgctagaagaacacagtgaagggaaacaaataaagaatttgccagaagaaacattttcaaggtttctattacaactggttggtattcttttagaagacattgttacaaaacagctgaaggtggaaatgagtgagcagcaacatactttctattgccaggaactaggcacactgctaatgtgtctgatccacatcttcaagtctggaatgttccggagaatcacagcagctgccactaggctgttccgcagtgatggctgtggcggcagtttctacaccctggacagcttgaacttgcgggctcgttccatgatcaccacccacccggccctggtgctgctctggtgtcagatactgctgcttgtcaaccacaccgactaccgctggtgggcagaagtgcagcagaccccgaaaagacacagtctgtccagcacaaagttacttagtccccagatgtctggagaagaggaggattctgacttggcagccaaacttggaatgtgcaatagagaaatagtacgaagaggggctctcattctcttctgtgattatgtctgtcagaacctccatgactccgagcacttaacgtggctcattgtaaatcacattcaagatctgatcagcctttcccacgagcctccagtacaggacttcatcagtgccgttcatcggaactctgctgccagcggcctgttcatccaggcaattcagtctcgttgtgaaaacctttcaactccaaccatgctgaagaaaactcttcagtgcttggaggggatccatctcagccagtcgggagctgtgctcacgctgtatgtggacaggcttctgtgcacccctttccgtgtgctggctcgcatggtcgacatccttgcttgtcgccgggtagaaatgcttctggctgcaaatttacagagcagcatggcccagttgccaatggaagaactcaacagaatccaggaataccttcagagcagcgggctcgctcagagacaccaaaggctctattccctgctggacaggtttcgtctctccaccatgcaagactcacttagtccctctcctccagtctcttcccacccgctggacggggatgggcacgtgtcactggaaacagtgagtccggacaaagactggtacgttcatcttgtcaaatcccagtgttggaccaggtcagattctgcactgctggaaggtgcagagctggtgaatcggattcctgctgaagatatgaatgccttcatgatgaactcggagttcaacctaagcctgctagctccatgcttaagcctagggatgagtgaaatttctggtggccagaagagtgccctttttgaagcagcccgtgaggtgactctggcccgtgtgagcggcaccgtgcagcagctccctgctgtccatcatgtcttccagcccgagctgcctgcagagccggcggcctactggagcaagttgaatgatctgtttggggatgctgcactgtatcagtccctgcccactctggcccgggccctggcacagtacctggtggtggtctccaaactgcccagtcatttgcaccttcctcctgagaaagagaaggacattgtgaaattcgtggtggcaacccttgaggccctgtcctggcatttgatccatgagcagatcccgctgagtctggatctccaggcagggctggactgctgctgcctggccctgcagctgcctggcctctggagcgtggtctcctccacagagtttgtgacccacgcctgctccctcatctactgtgtgcacttcatcctggaggccgttgcagtgcagcctggagagcagcttcttagtccagaaagaaggacaaataccccaaaagccatcagcgaggaggaggaggaagtagatccaaacacacagaatcctaagtatatcactgcagcctgtgagatggtggcagaaatggtggagtctctgcagtcggtgttggccttgggtcataaaaggaatagcggcgtgccggcgtttctcacgccattgctaaggaacatcatcatcagcctggcccgcctgccccttgtcaacagctacacacgtgtgcccccactggtgtggaagcttggatggtcacccaaaccgggaggggattttggcacagcattccctgagatccccgtggagttcctccaggaaaaggaagtctttaaggagttcatctaccgcatcaacacactaggctggaccagtcgtactcagtttgaagaaacttgggccaccctccttggtgtcctggtgacgcagcccctcgtgatggagcaggaggagagcccaccagaagaagacacagagaggacccagatcaacgtcctggccgtgcaggccatcacctcactggtgctcagtgcaatgactgtgcctgtggccggcaacccagctgtaagctgcttggagcagcagccccggaacaagcctctgaaagctctcgacaccaggtttgggaggaagctgagcattatcagagggattgtggagcaagagattcaagcaatggtttcaaagagagagaatattgccacccatcatttatatcaggcatgggatcctgtcccttctctgtctccggctactacaggtgccctcatcagccacgagaagctgctgctacagatcaaccccgagcgggagctggggagcatgagctacaaactcggccaggtgtccatacactccgtgtggctggggaacagcatcacacccctgagggaggaggaatgggacgaggaagaggaggaggaggccgacgcccctgcaccttcgtcaccacccacgtctccagtcaactccaggaaacaccgggctggagttgacatccactcctgttcgcagtttttgcttgagttgtacagccgctggatcctgccgtccagctcagccaggaggaccccggccatcctgatcagtgaggtggtcagatcccttctagtggtctcagacttgttcaccgagcgcaaccagtttgagctgatgtatgtgacgctgacagaactgcgaagggtgcacccttcagaagacgagatcctcgctcagtacctggtgcctgccacctgcaaggcagctgccgtccttgggatggacaaggccgtggcggagcctgtcagccgcctgctggagagcacgctcaggagcagccacctgcccagcagggttggagccctgcacggcgtcctctatgtgctggagtgcgacctgctggacgacactgccaagcagctcatcccggtcatcagcgactatctcctctccaacctgaaagggatcgcccactgcgtgaacattcacagccagcagcacgtactggtcatgtgtgccactgcgttttacctcattgagaactatcctctggacgtagggccggaattttcagcatcaataatacagatgtgtggggtgatgctgtctggaagtgaggagtccaccccctccatcatttaccactgtgccctcagaggcctggagcgcctcctgctctctgagcagctctcccgcctggatgcagaatcgctggtcaagctgagtgtggacagagtgaacgtgcacagcccgcaccgggccatggcggctctgggcctgatgctcacctgcatgtacacaggaaaggagaaagtcagtccgggtagaacttcagaccctaatcctgcagcccccgacagcgagtcagtgattgttgctatggagcgggtatctgttctttttgataggatcaggaaaggctttccttgtgaagccagagtggtggccaggatcctgccccagtttctagacgacttcttcccaccccaggacatcatgaacaaagtcatcggagagtttctgtccaaccagcagccatacccccagttcatggccaccgtggtgtataaggtgtttcagactctgcacagcaccgggcagtcgtccatggtccgggactgggtcatgctgtccctctccaacttcacgcagagggccccggtcgccatggccacgtggagcctctcctgcttctttgtcagcgcgtccaccagcccgtgggtcgcggcgatcctcccacatgtcatcagcaggatgggcaagctggagcaggtggacgtgaaccttttctgcctggtcgccacagacttctacagacaccagatagaggaggagctcgaccgcagggccttccagtctgtgcttgaggtggttgcagccccaggaagcccatatcaccggctgctgacttgtttacgaaatgtccacaaggtcaccacctgctgagcgccatggtgggagagactgtgaggcggcagctggggccggagcctttggaagtctgcgcccttgtgccctgcctccaccgagccagcttggtccctatgggcttccgcacatgccgcgggcggccaggcaacgtgcgtgtctctgccatgtggcagaagtgctctttgtggcagtggccaggcagggagtgtctgcagtcctggtggggctgagcctgaggccttccagaaagcaggagcagctgtgctgcaccccatgtgggtgaccaggtcctttctcctgatagtcacctgctggttgttgccaggttgcagctgctcttgcatctgggccagaagtcctccctcctgcaggctggctgttggcccctctgctgtcctgcagtagaaggtgccgtgagcaggctttgggaacactggcctgggtctccctggtggggtgtgcatgccacgccccgtgtctggatgcacagatgccatggcctgtgctgggccagtggctgggggtgctagacacccggcaccattctcccttctctcttttcttctcaggatttaaaatttaattatatcagtaaagagattaattttaacgtaactctttctatgcccgtgtaaagtatgtgaatcgcaaggcctgtgctgcatgcgacagcgtccggggtggtggacagggcccccggccacgctccctctcctgtagccactggcatagccctcctgagcacccgctgacatttccgttgtacatgttcctgtttatgcattcacaaggtgactgggatgtagagaggcgttagtgggcaggtggccacagcaggactgaggacaggcccccattatcctaggggtgcgctcacctgcagcccctcctcctcgggcacagacgactgtcgttctccacccaccagtcagggacagcagcctccctgtcactcagctgagaaggccagccctccctggctgtgagcagcctccactgtgtccagagacatgggcctcccactcctgttccttgctagccctggggtggcgtctgcctaggagctggctggcaggtgttgggacctgctgctccatggatgcatgccctaagagtgtcactgagctgtgttttgtctgagcctctctcggtcaacagcaaagcttggtgtcttggcactgttagtgacagagcccagcatcccttctgcccccgttccagctgacatcttgcacggtgaccccttttagtcaggagagtgcagatctgtgctcatcggagactgccccacggccctgtcagagccgccactcctatccccaggccaggtccctggaccagcctcctgtttgcaggcccagaggagccaagtcattaaaatggaagtggattctggatggccgggctgctgctgatgtaggagctggatttgggagctctgcttgccgactggctgtgagacgaggcaggggctctgcttcctcagccctagaggcgagccaggcaaggttggcgactgtcatgtggcttggtttggtcatgcccgtcgatgttttgggtattgaatgtggtaagtggaggaaatgttggaactctgtgcaggtgctgccttgagacccccaagcttccacctgtccctctcctatgtggcagctggggagcagctgagatgtggacttgtatgctgcccacatacgtgagggggagctgaaagggagcccctcctctgagcagcctctgccaggcctgtatgaggcttttcccaccagctcccaacagaggcctcccccagccaggaccacctcgtcctcgtggcggggcagcaggagcggtagaaaggggtccgatgtttgaggaggcccttaagggaagctactgaattataacacgtaagaaaatcaccattccgtattggttgggggctcctgtttctcatcctagctttttcctggaaagcccgctagaaggtttgggaacgaggggaaagttctcagaactgttggctgctccccacccgcctcccgcctcccccgcaggttatgtcagcagctctgagacagcagtatcacaggccagatgttgttcctggctagatgtttacatttgtaagaaataacactgtgaatgtaaaacagagccattcccttggaatgcatatcgctgggctcaacatagagtttgtcttcctcttgtttacgacgtgatctaaaccagtccttagcaaggggctcagaacaccccgctctggcagtaggtgtcccccacccccaaagacctgcctgtgtgctccggagatgaatatgagctcattagtaaaaatgacttcacccacgcatatacataaagtatccatgcatgtgcatatagacacatctataattttacacacacacctctcaagacggagatgcatggcctctaagagtgcccgtgtcggttcttcctggaagttgactttccttagacccgccaggtcaagttagccgcgtgacggacatccaggcgtgggacgtggtcagggcagggctcattcattgcccactaggatcccactggcgaagatggtctccatatcagctctctgcagaagggaggaagactttatcatgttcctaaaaatctgtggcaagcacccatcgtattatccaaattttgttgcaaatgtgattaatttggttgtcaagttttgggggtgggctgtggggagattgcttttgttttcctgctggtaatatcgggaaagattttaatgaaaccagggtagaattgtttggcaatgcactgaagcgtgtttctttcccaaaatgtgcctcccttccgctgcgggcccagctgagtctatgtaggtgatgtttccagctgccaagtgctctttgttactgtccaccctcatttctgccagcgcatgtgtcctttcaaggggaaaatgtgaagctgaaccccctccagacacccagaatgtagcatctgagaaggccctgtgccctaaaggacacccctcgcccccatcttcatggagggggtcatttcagagccctcggagccaatgaacagctcctcctcttggagctgagatgagccccacgtggagctcgggacggatagtagacagcaataactcggtgtgtggccgcctggcaggtggaacttcctcccgttgcggggtggagtgaggttagttctgtgtgtctggtgggtggagtcaggcttctcttgctacctgtgagcatccttcccagcagacatcctcatcgggctttgtccctcccccgcttcctccctctgcggggaggacccgggaccacagctgctggccagggtagacttggagctgtcctccagaggggtcacgtgtaggagtgagaagaaggaagatcttgagagctgctgagggaccttggagagctcaggatggctcagacgaggacactcgcttgccgggcctgggcctcctgggaaggagggagctgctcagaatgccgcatgacaactgaaggcaacctggaaggttcaggggccgctcttcccccatgtgcctgtcacgctctggtgcagtcaaaggaacgccttcccctcagttgtttctaagagcagagtctcccgctgcaatctgggtggtaactgccagccttggaggatcgtggccaacgtggacctgcctacggagggtgggctctgacccaagtggggcctccttgtccaggtctcactgctttgcaccgtggtcagagggactgtcagctgagcttgagctcccctggagccagcagggctgtgatgggcgagtcccggagccccacccagacctgaatgcttctgagagcaaagggaaggactgacgagagatgtatatttaattttttaactgctgcaaacattgtacatccaaattaaaggaaaaaaatggaaaccatcaaaaaaaaaaaaaaaaaa

SEQ ID NO: 116 - DNA, 19859 bp, Homo sapiens
  source 1..19859: mol_type = genomic DNA
gaaagggccttgacatcagttcctttgtgtgtactcactgaagcctgcgttggtccagagcggaggctgtgtgcctgggggagttttcctctatacatctctccccaaccctaggttccctgttcttcctccagctgcaccagagcaacctctcactccccatgccacgttccacagttgccaccacctctgtggcattgaaatgagcacctccattaaagtctgaatcagtgcactgttgtgtctaaggagtcttactctagtccctatgaggggagagaagatggagcacctggaagctggtgaaactggatagcagagctgggggggcacaaaaagaggaagacaaactgaacaaatatggccgagatgatggcactgcctaccccattctggctaggtggggtgcatgtggcccctgctttcttagcagaaggcttggctcccagacgcaggtgaattaaggggttcaagagcccctaaaagcataaaatattttgtgtgtgtgtgtgtgtgcacgcgcattttgggggaaagggggtctaaggtgttttcatatccaaagggcttgtggactggagcagctcctgtactgggcctctgccaacaaaaccctggctggttctcgaatggaacaggacttcatggccatcacccactgcaagatggggaaatgggaaggaagaatggttccgggggtagtatacggaaggacctaaggaaacagagtcctcaataaactgaagattcaggaacaaaagtgcttaacagaaccctggctgggtcagactaacagtaggtttccaatatgtggctagagacgtactactccttagctataactcgttaactcttatggggcctcagcgttgagatgctcattctaggtacccccgagggggacaaatcccttcctagtggctcggatgcaaggttgcgtcccacagatagggtttgcacatgggagatctaaccactagagggagtcagagttttgcaggacgccatactggacgccaagtgggaggaacttcaaggctgtcccctgcgggcctcccgctctgcttctgcgaaggtctggtcctggctccctctgccatcctgcccagctccaaggctaaaataggttctagttctgtatgggtagggcccatttcttttcttgccctccttcccgggtccctgacacctcagccattttcagttcaaagagcctcatgccccctttccatttctgtgccttttagtttcagtgtgggcatctcatctttcccttttctcctggcgaccctttatgcctcccttggggtttcctgtactttcctctgtgcctctcagttttctctggggtccctgatacccatcttaccttagtaactcccagactgaccaggactatcctagtttgagcctagttcctagcctctgtcctttctttcatccctcctcaccaggtcgccttctctgacagtctggccccccaacccccaaagtatcggggttggattgggttacagctagctctgcctgggcctcccaggcccttctctccactttccctttgtgccgttgcctggagaccaatgggttgtggggggctgagccagagagggagctggggtgagggatggctggggctgtgtgtgtgcgtgtgcgtgtgtgtgtgtgtgtgtgtgtgtgagagagagagagagagatgtcccctgcagctggactataagcctggccctcaggtaggggaggaatgggagagggtagacaatggtttcttttgtgactctcaccatcccctatccccacatatgcctaaatttttcttttagtatccattgtagcccattccttagtgattaaaaaacaagggagaagagctcagcctggaagggatttggaaagggcttgagccaaggcccagtgggagactgaactgagtggtacagaaagagaggaaatgccatggggagagagggtgagagggaaagggggagccctggaacaaagtcaggggtggggaggagcagcagctaccctagagcaagaggaagggagtcggggtgcacagggagacagggagctggcctggtctcagggaggccctgggaggaaggtgtgcttggagtggtaaagtgagtgccaaccaattcaagggacttcagagtgatgactcattcccaggccaaggaagtgttcctgttcctgcgcccagttccccagtgctctggaatcttgtttagagcttttgagtattcccagaactttgttgaatctggcccaaggaattgtgagacaaaaatctactgagctgctccagagctaacctccttccttccctgaaggcaggtgggatcttgccaattcagggcccacccttagcctccagcaagactggccccacaagtacccgacccccaccccaaatctggagctctactgagggctcctaatccacactccagctccagctcttccggcttgccagcctgcctccctcccattctctggccttcccaatttctgctgccaaaaatcaccctgtgtcctttgtcctgggagatgttgccgcttggtggagggccaggagggagcccaggagaaggaactggtggtgggctggcggaggtgctggcttcacggccgggagcagactgactgccagaggctacctggagagcaggggagggagaggaagggttgggaggagcctgcagtctgtggtggggactgtctccaccttagaacaagtgggattgagcaacaaggatacccagggatttgggtccacattaagcccagtcttcacccgactgcttccctgtgacccaggggatctttagtgatgactttcaacagatttgagaaggaaaatggagatgccactagatggaaggcctgaggatggtgtctcactcctccaagctgtatcccttacctatctacccatgagcttgccagcaacctccccccgctcccacatctgtcatttcctttaactgccctcgtttcccatctccattttttctttttttttttgagacggcgtctcgctctgtctcccaggctggagtgcagtggcgcgatctctgcttgctgaaacctttgcctcccaggttcaaggattctcctgcctcagcctctgagtagctgggattacaggcatgcgccaccacacccggctaatttttgtatttttagtagagacggggtttcgccatgttggccaggctggtcttgaactcctgacaagtgacccacccgactcagcctccgaaagtgctgagattacaggcgtgagcccccgcaccggccccatctccattttcttttcccatccatgatctttcctcttccatactgccgccagccataggccttgttcagcttacatttccttccaatcttcttatccccctcttccccattctgcccgcccaagtaaaccctcctcggctctactgggagcccccacccccaggatccagccagcccggtgtctcccacccttctttcccatccagagccctcctttctcacccagaacctattttccctagaattggcacctgggcccacctcgttcatcccttcttaaggttcctcacgcgttccctcctctctctcctcactgacgtttcctctggacttctctctctccagcattccttcatccccccacccccaattcttatatttatgactcttttgtcaacactaatcacccccaaaagctttactttttccagaagccccatctttctatatatgtcatcttttcaatttttctctctccttatgaccccaaacttccatcccattctctctgataatagcccccaaacccgtctggctccatctctgccacagatccctcaccccaagcttctctcacttctcaccaggcacccacaaagcccccaggcagctccatctttccaatccaatcccattatcccaatctctaccccaggatcccccaaactcctcccacttcacctctgccacagacccgctcgcccccaaacttcagcctcccctcatctgccctcaccacccacagcccctcctacctagccctctcccgcgccgggcccgcgggctccccacattccgccacggctagccctccccgcgccccggccccctcggcctcggcctcggccaactcgcgctgcgcctccccctctccggctccccctctctcccccctcgcggcttgcctcgcgctccctccctcgcgtctccctcctggcccctctctcctccgttcctccgcgctccctccttctccctcttcctcccttctcccatccccctctcccaggctccctcccttcgccgtccgctttcctgtgcgagtcgccggacgcaccgcccagcccgtccgcagccccgcgccgggtcggggcctcgggccgggccatttcggagggaccgcggcttcggggaggggctaggaggggggagagggagccgactgccggggaaggggcgggggccgcgggcgaggcggccgaggggcccgggatcgcgcgggtgcgggctgcgctaggcgggcgcgggcggcggcgggtcggaaccgcgccgagggccgggcgggccgcggggccgggcggcgcggcgggggcgggcggcgcggcccggggcattccgggcggccagggggaggcggcgagcccggggaggtggggagcagagcggggatcggggtttgctccgggggccggcgggcgattggggccaggcggggaaaaggggggatgggggccgccctccgggggggtcggggccgccgccgccgtcgtcgcggcggcgactgaggccgagaagaggagaggggggcgggggagctgccgccgccgccccccagaggcgccggagcccggaatcccgctcggagccagccagccgtcccgagctaccagcaggtaaggtctgcggccgcctgggccccgggcccgcggggttctgtcccgcccgggctccggcctgcggctccccacccccacccctcccagttccccctcctgccgccgccgcctccatttgttattttcccaatcccgtccccccactgcgggctctgcctggcctgagggccgggggctcagggggtggggcccgccgaggagagtcgggggccagggtttcgggaggatcgggaaggtggggaaggagggagggtctccggaggaggcctgtggggccagagggtatccgggacccgcagactcaaaagaggaggaacatcgaggccggggttggcggaggaaaacgggggatgctgtgagtggggttccgggcgaaggcagaatggataggagagatggcagcgaggtggggcatgaagcctccaggaaaaagctccaaaggaccagaacacgggttccggagcctggggttgggggctttaggaatagacgggaagtgggaaacgggaaaggggtgtggtaggtggaaagagggattgtggctgatgaacctgggggagacggaggcttgggcaaagagaggtccatttttgagaagagccggaggttttccagcgtggaagagggaaggccatgtctttgtgacggttttcattcccctactgcaggtcacctctgaccctgttttccctatcccagacatagttatttcttggagagggcactggggcccagtagtgtgggttatcccaaaactagtgaggaggaaaacaggaacacagaagggggagttgggaagaaaggggttctgggaggatggaaatggagaattgagcaaccttacaggcactccaggcaagttgcgacctccaccctccaccctccaatttccggagcgtccgctgcccctggagctgtgatctatatagggaggccttagttactgctttgagctcaaagatctccctttgtgcatgggcttattttgactagggtaggtaccttcaagctcccttacctgaggtgctataggagggtaggagttgctttggcaactggggtagggggtagctgccagatggacacctgggatggtctcttgaggggcaccttttgccactgtgttgctatggtagtgatccagtgggatgtcagattggttgggggggcttcgaatgtttattggacctcagcctgtggctgtccttgggactctgggctgggttttggaggttgtttctggatctgttggtggttgggagtttccccacggtgtgcaccctttcatgttgaagtctgttggaacaggtagatacgttccttgcagatcataggtgtttctccaagtctctccacctgggcatgatgggaggatgaaaacgcttctgttcaggttacaccatcttttggcagttggttctgacctctacctcccttattatgttattttttgtagagttgtctttttgcttctttgcactttctttcattttctaaaacttgaattcctctttgagcctcccttcttgagtaacccttttcctctttccctcaactaacctttggccttcttccctgaccttgtagaaatggctgggctcccaggcccatcccaggtgagggtggcccaggacagagggctgtgaaacagcttcatgcaggggaaatactatagaacaggagccaggagacctgtgtctagacctggctgtgcctctgtgaccttgggcaagtcacttctctttgagcctgggcttcattgttaagatgaaggggctatagatgagatgatctctgaggcctctctgaaggtcccggattctcagaaggcttaggccagtgcatcgttatctgctggtctgggctgcattgttatctaggagtcactttggactggtttgttagtctggcaggtccagaatgatgttgggggctgggccaatgatcctgaaatttagcctgcgagcccctcccagagagcttgtgactccactgtattccttctgacatcccatatttctctcttaatttcttttcctgttcttacttaggggctctttttctagttctcactttcctcccaacccagtctggtcttaatcattttctttttaaagtaaggtaatggcagtgcgcagtggctcacgcctgtaatcccagcactttgggaggctgaggcgggcggatcacgaggtcaggcgattgagaccatcctggctaacacggtgaaaccccgtctctagtaaaaatacaaaaaaattagccgggcgtggtggcgggcgcctgtagtcccagctactcaggaggctgaggcaggagaatggcgtgaacccgggaggtggagcttgcagtgagccgagccgagatcgcggcacggcactccagcctgggtgacagagtgagactccgtctcaataaataaataaataaataaataaataaaataaagcaaggtaatgaaggtgaatgtgcttagtatgtggccagatacagagtaggtgctctgtaatattagttacagtgattgcctgctaggagtgtaggctggtgctaaaacatgacccaggtctagaaagacacacaatccacccctaactcctttcctcgtctgccactccttatccccaggattacttgttcttttatgactgcttttctccttcaaagcttctcattgctagtttttatcagatttcaggtgattaaaaaagaagggcatactatgattgctgtgttcctcaggtacattcctgtgtttctctgaccttttggatcccctaacctaactgacttggtgaacaggttctgtgatggggaagggagatggacacccttctctaggagggctggcaaaaatacaccaatcacaaatagtcatctttgttgtgctttttgtttaagattgttttcctcttttgctatggtgggtgttgttcttcggatttttttttttttttggttgatagtattttaaaaccagtctacataacaactaaaaaatgtgggaaaatagctgtagttgaaaaaaaaaaaaaaaaaaaaaaggccgggcatggtggctcacgcctgtaatcccaacactttaggaggctgaggcaggtggatcatctgaggtcaggagttcgagaccagcctggtcaacatggtgaaactccgtctctactaaaaatacaaaaattagccaggtgtggtggtgtgcgcttgtaatcccagctacttgggaggctgaggcaggagaatcgcttgaacctgggaggcggaggtggcagtgagctgagatcatgccatagcacctccagcctggggaacaagagcaaagatccatctcaaaaaaaaaaaaaaggaaaaaaaaagaaaactagttggccgggcacagtggctcacgcctgtaatcccagcacttgggaaggccgaggcaggcagatcacctgaggtcagtagttcgagaccaccctgactaacatggtgaaaccctgtctctactaaaaatacaaaaaattagccgggtgtggtggtgcatgcctgtaatcccagctattcaggaggctgaggcaggagaatcgcttgaacctgggaggcagaggttgcagtgagtgagatcacgccactgcactccagcctgggcaacaagagtgaaactctgtctcaaaaaaaaaaaaaaaaaaaaaaaaaaagacaagtctactgggcagagcatcagttgaaagttcagaagataggctctgtcccagcaattttgtgattctaagtaaattgtgaagtttcctggaaaggttagactcaccccttactgcctgcatcagtatggttccgtggaggtgagtgagaattactgtgtttcttgggaaaaaatacactacagaatatggacatgccgtttacctagcaggcctccaactcagaatagaatacatgggtaagcttagtctgttcccactggagctagcagcacttaattcaggaagaaagacctactgatgttagtgggtttaaaggtcaatcacaagaagagcgcacacacatcagtggaaaggaagaaaacagtaagaaaataccatttttgctctcaaaagatcttacaatcagtaatttggagggacttgacacttagcaagaaatacaaacaagtgcaaatgaatacagctggctatagggatttggataaagatagatacctgctgatagacagatacggatggattggctgtgagaaactgtgtaacccagtctacaccaagtaggaggataggcttaaaaactggtacatctgtgttgtttgctcacggatattttgagtctttaatcattcatgtgaaaaccctgacttttcctctagccttagggagctcaagtactagagaatgggtcctttatggggctctcaaaaatgaagttctacaatttggggctacctaggtttagtcttgggattggtagggctgtgttcctttgtattatagaatgggacattcttcttctacctactctgatgtgagaaaagattcttttcatatctctgtgactgatctaggccttctgagaattctccccagcaacttctgaggagaatacagcaaagtatagaagaaagagcatgggctttgaagtcaccgacatgggtttgattctggctctgtcactggttcctcactgtgtgaggttgggctagtcacaatcacaatctttgagcctcagttccctcacctatataatgagggtaataatgcttaccattcagggttggttgtaaatattaaatgaaatcatgtatgtgaagggcttgatataaagaaggtattcaataaattcatacttcaatgtcatttcttttttctttttttttttttgagacagagtcttactctgtcacccaggctggagtgcagtggcatgatctcggctcactgcaacctctgcctcccaggttcaagtgatttgcttgcctcagcctcctgagtagctgggattacaggcacgtgccaccacgcctggctgggtttcaccatgttggctaggctggtcttgaactcctgaccttgtggtccatccacctaggcctcccaaagtgctggaattatagacatgagccaccatgccccgctccatttctttatgttcctttgtaaggctccgtggaatgtgtgtgttcacaaatatcctttagggatcatgaagggtaaactgtgtgatctcctggattggggcttgtaggtacatccgaattttctgccctctacagagatgaaagagattatacttcgagcagaatctgcctcccttttagatagctaaggtagcccatggggcatgccagcaatgtcttgtggtatctgtacctcttggcccaaaggcttagggttgggccgcttgctcagttctctgacaagcagaatagtattcctttgtgactctgttctccaagttggagactctgatggtttccttctaacaggtttcattgaaaacagatcctgcaaaagttccaggtgcccacactggaaacttggagatcctgcttcccagaccacagctgtggggaacttggggtggagcagagaagtttctgtattcagctgcccaggcagaggagaatggggtctccacagcctgaagaatgaagacacgacagaataaagactcggtgagttaaaatgagagacatgaaagatgaggggcggggcaggcaagctaggaggaagggtctagagaagaagaacaaataatgtgcaccataaagttaggtgcaatgtaaagaacagtgttacctacctccttcctcctcctgtagatgtcaatgaggagtggacggaagaaagaggcccctgggccccgggaagaactgagatcgaggggccgggcctcccctggaggggtcagcacgtccagcagtgatggcaaagctgagaagtccaggcagacagccaaggtattctgtcctcaggtcctcccacaggatgcccaaggcactggggctgagggtgtgtgtgtgttgtgggggaacttcctgtttggcagagggtaacggtggagctcgggaggtagggaaaagacaggaattttctctttctctctaacagaaggcccgagtagaggaagcctccaccccaaaggtcaacaagcagggtcggagtgaggagatctcagagagtgaaagtgaggagaccaatgcaccaaaaaagaccaaaactgaggtgggaaacccttgtcgccatcctgacccatcttgtgaccattcttttctcagacttgcttatgctcactattcttagctggatctctcctgggacataagagaaaggccagatcatagtgcttatgagagcagttctgtctataatatgccagagagattcttagagctttgacagaccaccagatgaccaggcagggccaaaggggaccagaagagttgggggattctagtctctgggtgagaagtcttagtcggaggaacaaataaatcttaaggaaaatgcagaagtggtctttcttttttattgtttttttttgtttgtttgtttttgagacagtttcgctctgtcacccaggctggagtacagtggcacaatctcagctcattgcaacctccgcctcctgggttcaaacaattgtgcctcagcctcccgagtggctgggattataggcatgagccaccatgcccggctaatttttgtatttttggtagagacagtgtttcaccatgttggccaggctggtttggaactcctggcatcaagtgatccgcccgcttcagcttcccaaagtgctgggattacaggtgtaagcctctgtgcccggccagaagtggtataaaaaccaagggcttgggggatggaggatggttaaagtggtggttatgagatggtggaagacagggagttggagtcagctgtgggtagagacaaggtgcttgagatggatccttgaggaaggaatagggttttacaggcgggaaacaagactggctgctagggagcagccaagaatgtgaggaaagtgagaaatccccagatggtaagaggtgggcttgagcaagagtactcaccacatcacagtacaacagtgtgctgtgaggggaaatgattttatgcaagagagccccaaatctcagggaagcaggaaaggaaaagagaaaaaatgagtcttcccttttctacagcaggaactccctcggccacagtctccctccgatctggatagcttggacgggcggagccttaatgatgatggcagcagcgaccctagggatatcgaccaggacaaccgaagcacgtcccccagtatctacagccctggaagtgtggagaatgactctgactcatcttctggcctgtcccagggcccagcccgcccctaccacccacctccactctttcctccttcccctcaaccgccagacagcacccctcgacagccagaggctagctttgaaccccatccttctgtgacacccactggatatcatgctcccatggagccccccacatctcgaatgttccaggctcctcctggggcccctccccctcacccacagctctatcctgggggcactggtggagttttgtctggacccccaatgggtcccaaggggggaggggctgcctcatcagtggggggccctaatgggggtaagcagcaccccccacccactactcccatttcagtatcaagctctggggctagtggtgctcccccaacaaagccgcctaccactccagtgggtggtgggaacctaccttctgctccaccaccagccaacttcccccatgtgacaccgaacctgcctcccccacctgccctgagacccctcaacaatgcatcagcctctccccctggcctgggggcccaaccactacctggtcatctgccctctccccacgccatgggacagggtatgggtggacttcctcctggcccagagaagggcccaactctggctccttcaccccactctctgcctcctgcttcctcttctgctccagcgccccccatgaggtttccttattcatcctctagtagtagctctgcagcagcctcctcttccagttcttcctcctcttcctctgcctcccccttcccagcttcccaggcattgcccagctacccccactctttccctcccccaacaagcctctctgtctccaatcagccccccaagtatactcagccttctctcccatcccaggctgtgtggagccagggtcccccaccacctcctccctatggccgcctcttagccaacagcaatgcccatccaggccccttccctccctctactggggcccagtccaccgcccacccaccagtctcaacacatcaccatcaccaccagcaacagcaacagcagcagcagcagcagcagcagcagcagcagcagcagcagcagcatcacggaaactctgggccccctcctcctggagcatttccccacccactggagggcggtagctcccaccacgcacacccttacgccatgtctccctccctggggtctctgaggccctacccaccagggccagcacacctgcccccacctcacagccaggtgtcctacagccaagcaggccccaatggccctccagtctcttcctcttccaactcttcctcttccacttctcaagggtcctacccatgttcacacccctccccttcccagggccctcaaggggcgccctaccctttcccaccggtgcctacggtcaccacctcttcggctaccctttccacggtcattgccaccgtggcttcctcgccagcaggctacaaaacggcctccccacctgggcccccaccgtacggaaagagagccccgtccccgggggcctacaagacagccaccccacccggatacaaacccgggtcgcctccctccttccgaacggggaccccaccgggctatcgaggaacctcgccacctgcaggcccagggaccttcaagccgggctcgcccaccgtgggacctgggcccctgccacctgcggggccctcaggcctgccatcgctgccaccaccacctgcggcccctgcctcagggccgcccctgagcgccacgcagatcaaacaggagccggctgaggagtatgagacccccgagagcccggtgcccccagcccgcagcccctcgccccctcccaaggtggtagatgtacccagccatgccagtcagtctgccaggtgagcggccaggtggggcggaggtgggcctggaaaggggacgacgacaaggcggcgacgagagagggagtagcagggaggggccttgcgctggtgtagtgttttagaaaagcacgcccctctcctccgtccaggcctagtggccagtgaggcccgcagcagctcacagcctgcaggggtggttttgaggcgggggctacaagcactcgccggggccgcggcgctgcgggctccatcgggcagctcgcaccgcctgagcgcccgctgcttccacgcccggcaggttcaacaaacacctggatcgcggcttcaactcgtgcgcgcgcagcgacctgtacttcgtgccactggagggctccaagctggccaagaagcgggccgacctggtggagaaggtgcggcgcgaggccgagcagcgcgcgcgcgaagaaaaggagcgcgagcgcgagcgggaacgcgagaaagagcgcgagcgcgagaaggagcgcgagcttgaacgcagcgtggtgagtgcgtcactgcctgcgccaccgccttctttccctctttccttccttccctctgcgctgcgctgcgctacgctacgctgcggggctgtggctgggtgggcgggcgagtcacgtcgccacctgtcggaggggaggtaccactgcagcccaggaaatggagcccaaaaggttttcagcgagagccatctgcattcctgggttgggaaaaggcatgctcagatgggactacctgtggatcccaagaagggcaaatattcgggagcgggggccgcagttaagttccaggtgggcagagtttcaatgagttgaggcattttggcattcggctgtcgaaacaaatgggcagcttaaaaccagccacctcttttcataactgccgctttgactccacttttccctgtatcccacagaagttggctcaggagggccgtgctccggtggaatgcccatctctgggcccagtgccccatcgccctccatttgaaccgggcagtgcggtggctacagtgcccccctacctgggtcctgacactccagccttgcgcactctcagtgaatatgcccggcctcatgtcatgtctcctggcaatcgcaaccatccattctacgtgcccctgggggcagtggacccggggctcctgggttacaatgtcccggccctgtacagcagtgatccagctgcccgggagagggaacgggaagcccgtgaacgagacctccgtgaccgcctcaagcctggctttgaggtgaagcctagtgagctggaacccctacatggggtccctgggccgggcttggatccctttccccgacatgggggcctggctctgcagcctggcccacctggcctgcaccctttcccctttcatccgagcctggggcccctggagcgagaacgtctagcgctggcagctgggccagccctgcggcctgacatgtcctatgctgagcggctggcagctgagaggcagcacgcagaaagggtggcggccctgggcaatgacccactggcccggctgcagatgctcaatgtgactccccatcaccaccagcactcccacatccactcgcacctgcacctgcaccagcaagatgctatccatgcaggtgagacccctccttccttgccctggccctttggggccaccttccccctatcatgactgggctctttcattcctatggccaagactttcctcccctggcctggcatgaacctttcctgagattgctgccctgaactttgcctccctgacgttctctcagccttgtcttctcatggccttccctggccacaaagcctgtatgccccacagcccagttctctccatagtctagtatccttcccatgacagaggcccacacgggagcttttgaaggacacttttctattctcacagccccattctcccaagcccttcacaaacctgtcttcttatttatttttttgagacatggtctggctctgccacccaggctggagtgtagtggcgcaatcacagctcactgcagcctcgacttcccggtctcaagtgatcctcctacctcagcctctggagtagctgggattacaggcgtgtgtcaccatacctggctactttttgtatttttggtagagacggggtttcgccatgttggccatggctggtctcaaattcctgagctcaaagcgatccacccacctcggcctcccaaagtcctgagattacaggcgtgagccaccgtgcccaacccacaaacctatcttctgatttctctggattcaactcattttttgccattttctcctcttctccctctgcgaggtctttcatgtttttccccatctctagatctgtaactttctagaaagggccctgtagctttgggtttgggtgtcataggcgataatgagctttacttactatcctttcaccattttttggtttttgagacggagtctcgccctgtcaccaagctggagtgcagtggcgcgatctcggcttactgcaacctccgcctctggggttcaagtgattcttctgcctcagcaggcactgcctgcccgagtagctgggactgcaggcgtgtgccaccaagtacagctaatttttgtatttttagtagacacggggtttcaccatgttggccaggatagtcttgatctcttgaccttgtgatccacccgccttggcctcccaaagtgctggaattacaagcgtgagccaccgcacccggcttcctttttttcttttgcccagactggagtgcagtggcgcgatctcggctcactgcagcttccacctcccaggttcaagcgattctcctgcctcagcctcccgaggagctgggactataggcgtgtgccaccctgcctggctaatttttttgtattttttgtagaaacagggtttcaccatcttggccaggctggtcttgaactcctcacctcaggtgagctgcctgcctcagcctcccaaagtgctgagattataggcttgagccactgtgcccggcctcttcttgtcttattttctaaacttctatcatcttccaccttcttcacgcagtctacctctctctgtccttcccctcagacccttctgatgactgtaatctcctgtcctgtgtcatccatatgtccctcctccagtagggctcagcctgtccacccctgccaggcctctagttcttccactctgcctttgttccactttggacctccttgtgtttgtctgactcagttcccaggcttggatcccttcacccaaatgcatggtttgccccaaacctgccttctggtgacaccttcctcttctctgccctccagcctctgcctcggtgcaccctctcattgaccccctggcctcagggtctcaccttacccggatcccctacccagctggaactctccctaaccccctgcttcctcaccctctgcacgagaacgaagttcttcgtcaccagctctttggtaaggatggaagttggggtaggcagctccaatgagaaaagggcagaaaggaggtatttgggtggggggatgggcctagttgggcttggggagggatgaggaggtgcctagaggagctgggcatgggaataggagagctggagctctgcccaagagaagcacgagttttagtgtcagcctaagaggttcgaatcccaattccaccctaccactggcaacttacagaactgggtgtgttacctcactttttagttcattacctttgtatgtaaaggagctggctatcccctggtccagagcaggtacttgttatccgttggtcatatgccccttgcccttcctgctcacagctgccccttaccgggacctgccggcctccctttctgccccgatgtcagcagctcatcagctgcaggccatgcacgcacagtcagctgagctgcagcgcttggcgctggaacagcagcagtggctgcatgcccatcacccgctgcacagtgtgccgctgcctgcccaggaggactactacaggtaccctagggtgccccagcccaggggacatgggctcagcgagcctgggaggagctgtgggcatggtacggctgggcaccgtgctcctgggggagggaacccctcctctcccaaccccttcggtaagagggggcaaggtcagagttggtctcaagtctcttacctctctgctatgcactgccccttccctagtcacctgaagaaggaaagcgacaagccactgtagaacctgcgatcaagagagcaccatggctcctacattggaccttggagcacccccaccctccccccaccgtgcccttggcctgccacccagagccaagagggtgctgctcagttgcagggcctccgcagctggacagagagtgggggagggagggacagacagaaggccaaggcccgatgtggtgtgcagaggtggggaggtggcgaggatggggacagaaagcgcacagaatcttggaccaggtctctcttccttgtcccccctgcttttctcctcccccatgcccaacccctgtggccgccgcccctcccctgccccgttggtgtgattatttcatctgttagatgtggctgttttgcgtagcatcgtgtgccacccctgcccctccccgatccctgtgtgcgcgccccctctgcaatgtatgccccttgccccttccccacactaataatttatatatataaatatctatatgacgctcttaaaaaaacatcccaaccaaaaccaaccaaacaaaaacatcctcacaactccccaggaacatggctgtgactattctttgcgggatatgggggtgaggctgggtctcagtgcagcggtgcttagagagaactgcagccagggcctggcagggaagcgggaagagaccagaccttcttaaggaacggggtgtgggggctgggaagaattggagaggggatccctgaagagcccagagccttgactcagctggaggcggtaccatgggtgctggtgccccctcctgccccaaggctgggcaggaccgctgcgcgccagtggaggcctcggtctgggctctgtggcttatgcctgtgagacgcgggtggattgcttgagcccaggagttggaaaccagcttgggcaacatagagaaaccccatcttaagacaaaatcagctgggggttgtggtgcacttgtggtcccagctactcaggaggctgaggtgggaggatcacttgggggtcgaggctacagtgagtcatgatcgcaccactgcactctagcctgggtgacagagcaaggccctatctcaaaacaaacaaacaaaagacaccccaaccaaccaaacactagaggcctgggacaggcccacctctgacgtggtcagttctaggaatctattcagacgggtctcactgctaggagccaccagagtcctccggaacaagggcttcagagtcctgaaacctttccgtggaatactttaagaaacggttatgaggccaggcgcgacggctcacgctggtaatcccaggactttgggaggccgaggcgggcggatcacgaggtcaggagttccagaccagcttggccaacatggcaaaaccctgtctctactaaaaacaaaacattagctgggcatggtggcgcgcgcctgtcgtcccagcgacttgggaggttgaggcaggagaatcgcttgaacccgggaggtggaggttatggtgagccaagatcccccccagctgcactccagcttggcgacagagcaagactccgtctcaaaaacaaaaaacaaagc

SEQ ID NO: 117 - RNA, 4367 nt, Homo sapiens
  source 1..4367: mol_type = mRNA
gacgccatactggacgccaagtgggaggaacttcaaggctgtcccctgcgggcctcccgctctgcttctgcgaaggtttcattgaaaacagatcctgcaaaagttccaggtgcccacactggaaacttggagatcctgcttcccagaccacagctgtggggaacttggggtggagcagagaagtttctgtattcagctgcccaggcagaggagaatggggtctccacagcctgaagaatgaagacacgacagaataaagactcgatgtcaatgaggagtggacggaagaaagaggcccctgggccccgggaagaactgagatcgaggggccgggcctcccctggaggggtcagcacgtccagcagtgatggcaaagctgagaagtccaggcagacagccaagaaggcccgagtagaggaagcctccaccccaaaggtcaacaagcagggtcggagtgaggagatctcagagagtgaaagtgaggagaccaatgcaccaaaaaagaccaaaactgagcaggaactccctcggccacagtctccctccgatctggatagcttggacgggcggagccttaatgatgatggcagcagcgaccctagggatatcgaccaggacaaccgaagcacgtcccccagtatctacagccctggaagtgtggagaatgactctgactcatcttctggcctgtcccagggcccagcccgcccctaccacccacctccactctttcctccttcccctcaaccgccagacagcacccctcgacagccagaggctagctttgaaccccatccttctgtgacacccactggatatcatgctcccatggagccccccacatctcgaatgttccaggctcctcctggggcccctccccctcacccacagctctatcctgggggcactggtggagttttgtctggacccccaatgggtcccaaggggggaggggctgcctcatcagtggggggccctaatgggggtaagcagcaccccccacccactactcccatttcagtatcaagctctggggctagtggtgctcccccaacaaagccgcctaccactccagtgggtggtgggaacctaccttctgctccaccaccagccaacttcccccatgtgacaccgaacctgcctcccccacctgccctgagacccctcaacaatgcatcagcctctccccctggcctgggggcccaaccactacctggtcatctgccctctccccacgccatgggacagggtatgggtggacttcctcctggcccagagaagggcccaactctggctccttcaccccactctctgcctcctgcttcctcttctgctccagcgccccccatgaggtttccttattcatcctctagtagtagctctgcagcagcctcctcttccagttcttcctcctcttcctctgcctcccccttcccagcttcccaggcattgcccagctacccccactctttccctcccccaacaagcctctctgtctccaatcagccccccaagtatactcagccttctctcccatcccaggctgtgtggagccagggtcccccaccacctcctccctatggccgcctcttagccaacagcaatgcccatccaggccccttccctccctctactggggcccagtccaccgcccacccaccagtctcaacacatcaccatcaccaccagcaacagcaacagcagcagcagcagcagcagcagcagcagcagcagcagcagcagcatcacggaaactctgggccccctcctcctggagcatttccccacccactggagggcggtagctcccaccacgcacacccttacgccatgtctccctccctggggtctctgaggccctacccaccagggccagcacacctgcccccacctcacagccaggtgtcctacagccaagcaggccccaatggccctccagtctcttcctcttccaactcttcctcttccacttctcaagggtcctacccatgttcacacccctccccttcccagggccctcaaggggcgccctaccctttcccaccggtgcctacggtcaccacctcttcggctaccctttccacggtcattgccaccgtggcttcctcgccagcaggctacaaaacggcctccccacctgggcccccaccgtacggaaagagagccccgtccccgggggcctacaagacagccaccccacccggatacaaacccgggtcgcctccctccttccgaacggggaccccaccgggctatcgaggaacctcgccacctgcaggcccagggaccttcaagccgggctcgcccaccgtgggacctgggcccctgccacctgcggggccctcaggcctgccatcgctgccaccaccacctgcggcccctgcctcagggccgcccctgagcgccacgcagatcaaacaggagccggctgaggagtatgagacccccgagagcccggtgcccccagcccgcagcccctcgccccctcccaaggtggtagatgtacccagccatgccagtcagtctgccaggttcaacaaacacctggatcgcggcttcaactcgtgcgcgcgcagcgacctgtacttcgtgccactggagggctccaagctggccaagaagcgggccgacctggtggagaaggtgcggcgcgaggccgagcagcgcgcgcgcgaagaaaaggagcgcgagcgcgagcgggaacgcgagaaagagcgcgagcgcgagaaggagcgcgagcttgaacgcagcgtgaagttggctcaggagggccgtgctccggtggaatgcccatctctgggcccagtgccccatcgccctccatttgaaccgggcagtgcggtggctacagtgcccccctacctgggtcctgacactccagccttgcgcactctcagtgaatatgcccggcctcatgtcatgtctcctggcaatcgcaaccatccattctacgtgcccctgggggcagtggacccggggctcctgggttacaatgtcccggccctgtacagcagtgatccagctgcccgggagagggaacgggaagcccgtgaacgagacctccgtgaccgcctcaagcctggctttgaggtgaagcctagtgagctggaacccctacatggggtccctgggccgggcttggatccctttccccgacatgggggcctggctctgcagcctggcccacctggcctgcaccctttcccctttcatccgagcctggggcccctggagcgagaacgtctagcgctggcagctgggccagccctgcggcctgacatgtcctatgctgagcggctggcagctgagaggcagcacgcagaaagggtggcggccctgggcaatgacccactggcccggctgcagatgctcaatgtgactccccatcaccaccagcactcccacatccactcgcacctgcacctgcaccagcaagatgctatccatgcagcctctgcctcggtgcaccctctcattgaccccctggcctcagggtctcaccttacccggatcccctacccagctggaactctccctaaccccctgcttcctcaccctctgcacgagaacgaagttcttcgtcaccagctctttgctgccccttaccgggacctgccggcctccctttctgccccgatgtcagcagctcatcagctgcaggccatgcacgcacagtcagctgagctgcagcgcttggcgctggaacagcagcagtggctgcatgcccatcacccgctgcacagtgtgccgctgcctgcccaggaggactactacagtcacctgaagaaggaaagcgacaagccactgtagaacctgcgatcaagagagcaccatggctcctacattggaccttggagcacccccaccctccccccaccgtgcccttggcctgccacccagagccaagagggtgctgctcagttgcagggcctccgcagctggacagagagtgggggagggagggacagacagaaggccaaggcccgatgtggtgtgcagaggtggggaggtggcgaggatggggacagaaagcgcacagaatcttggaccaggtctctcttccttgtcccccctgcttttctcctcccccatgcccaacccctgtggccgccgcccctcccctgccccgttggtgtgattatttcatctgttagatgtggctgttttgcgtagcatcgtgtgccacccctgcccctccccgatccctgtgtgcgcgccccctctgcaatgtatgccccttgccccttccccacactaataatttatatatataaatatctatatgacgctcttaaaaaaacatcccaaccaaaaccaaccaaacaaaaacatcctcacaactccccaggaaaaaaaaaaaaaaaaaa

SEQ ID NO: 118 - DNA, 19769 bp, Homo sapiens
  source 1..19769: mol_type = genomic DNA
gattacgccacaatgaactacagaagggaaaatcaaggcgtgctgaagtcccactaagaaacaactgcggaaagagccatgtgacaacagtgcatgaactgggagtggcagaactgaatataaatgcatgtgtaaacacaagctgtttgttttgcttagtgttccttgtcattctacacgcttgaagatcagctagcgttcttgctgacaggtaaggaggacgcgcttactgagtgccaagcactgctcaggcactgattctgtcaatctctgtcaatctcccgacagcccaagggtaagcactgttatcattattcaattttacagaaaaaaaatgcgggggagaggtcaggtaacttgtcgaaggtaacgccgctagttgctttaaacaacaacaacaacaacaacaaaacacactcacacatatacacacacacgccatttaaaaatcgatctttcctacgtccagcaagggccaattagagatggctgtggcacggcggccccgccccggaactcctcaagagcttcgcccctccttacctatggaaacacaggaagtgacctatgctcacacttctcatggcctcggccctagtgggagcaactcgctgaagccgagggcagaactggcggaagtgacattatcaacgcgcgccaggggttcagtgaggtcgggcaggttcgctgtggcgggcgcctgggccgccggctgtttaacttcgcttccgctggcccatagtgatctttgcagtgacccaggtaacagattgtactcttttctgacggttcgggcgaaggccaccactgcactgaggcctgggggcaatggtggggaagagactaggaattggcgcgcgtgcaggcccctcgggggacgttcctccctttcgtgctgccgccgttccggcctgtaacggccactcggccgccactcccgcctggtgccctactctgctgtgtttcgcaggcagcttcccatcgtacgattgtggggctcagggtactactggctggctgggcggcggcaggcgggacaggacagtcccttgcatcgaagaccctaagtttaccctgccctgtcctgccatccgcttcttctccatgttagaagcagattcacccagatctgtgcccgcctgttttgctgccaacattgagacttaaatattttgtcagaagcctgagacagcgggcacggtagcgcttaagatataatacacaccactttatttgcagggtctcccgtctctcggttcaggccatcatggttttccaaatctctaggtagacttttctgtgaaaagactgtgcttcatttagttatacagacactagaaggctatgcagaattaatttgattgcctccaaaaaatatcggatttgatgtttcaatttccaggagatgaagatacccagcaaacaactcttttctgaggataaattagtgcagtaatcactgtgcggtttcttctgtagacttacttgcaaaaagtggcctgaagccaccgaaggtcctggataaatctctaatcatacttataatggctttaaatcctgccgtcattatctcttgcctcaaccttagattcctgaaacgaaacttccgtcctccagttttactcctctcaaattcatctagtcttgccaaattagatctgttcatactgcacttccgaaattccataactgttattattgcctatgcaataacattgaaaactcctgatagtatgagcccaccaatatgtgctgtctcatctgctgcagtgaccttctatacagtcatactaagcttgttgcctgcatactgcatgctttttcaatctgtctctttctgcttgatttctcttttgtctgaagccctgatgtgtaaattcctactcaccttgtgagacccaagttagatggtccctgctttgtgaaaacactgcgctctcttcacagtgattggctgttagtctatattgtcttctcttccaggggtgtatatgggctcattcatgatcacatactgtattccaggcatagtgctagatgcagagatcacaaagacatgtaggctggtttctgcattcaaggaacttagcttagaccatacctgctgttataatactatgttttacagtagttatttgcatacccttcatattgaacactttgatgccaaggactatatcctcctatctttatatcctcatctgcaggacttctgttattgttattataggataactgtcaaaaaaaaagtatattttaaaaaatatctctgatatatttatttccagaagcagagcttgctttcttttttggtctgtttttcagtgatgagtatgtaggatagatagtctttgggggcctttgccctttcaaagtgatcgtcagagtctttcatacattcagcaaatatctgagtgtctgttctgtaccagcacatgcttgaagtgcatatgcctgaaggatctttggacatataatttgtaactttgagacctctaagttctatgtgagaatatgttgttataaactcatttcagatgtgtagtgagtaaagcgatgatgatttaagaaaagtcagataacaggcacagtttgcattaatgtgttctaaagaggtaaggttattacatttataaaaattcagggctttatctttgtgcggcttttttttttttaacagtttcattacagtaggagcttgataaatgatcactctgaagtatattggattgaatttgatatttacttaattttttgcccaagacattgtagaggatgtaaaattggaatatttaaagatctaaactttgcctaacagtgctgtgtatacagtgcttagtgaatattctgctctgatattacattttgcttaggaattatttttctctaggtgtttttcctcaaaagtttttaatgctggttatgacagctcgattttgagcattttccgattatttaaacatgtaacaaaatgatttttgttttgttggcgattttacatgcaatcgccggaaacatggaaggaataaaactttaggattataaggtaaaaacaaatgtattccaaaatagcttcattggttttcatgtttgtgttttgtatagccatagaactggcttataggactgtacaggttacctggatccttaaattaaactttagacttttttccaaagcagcatcactgtttcttggcgtgtgaagataacccaaggaattgaggaagttgctgagaagagtgtgctggagatgctctaggaaaaaattgaatagtgagacgagttccagcgcaagggtttctggtttgccaagaagaaagtgaacatcatggatcagaacaacagcctgccaccttacgctcagggcttggcctcccctcaggtaatatagcaggagggagagaatagggagggcggaaatctgaactgcaagagatggtatcaaaaggcaaggaagggcatttaatgatctgtttttgaaaatggtttaatatgttttttaagccttattttgttgagaagttctattaggctttgaataggcacaatggtgtttatttgggaagtctggaagctaagttatatatttatgaaacacctaatcttttgataaacacttatgagaatgttccaaatgactatatagggtctttgattttgaaaatcaccctcaccaaattattttctagttttatttttccccttttacatttcaagctctcaaccacccatctactttaaaaatttttcagcctgggtgcagtggctcacgcctgtaatcccagcactttgggaggccaaggtgggcggatcacctgaggtcaggagttcgagaccagcctggccaacgtggtgaaacctcatctctacaaaatatacaaaaattagccaggtgttgtggcgggtgcctgtaatcccagctactcgggaggctgaggcaaggagaattgcttgaacccgggaggtggaggttgcagtgagcagaggtcgtgccactgcactccagcctgggagacagagcgagactctgtctcaaaaaaaaaaaaaaaaaaaaaaaaatcaataacttttgttgaaatatacatacaaaaaaactcattttaagtgtctgttttgataattatatataatgtataaattacagaacatttcagttaccttaaaaagtcccttcttcccctttatagtcactctgctggccccaggtaactactgcatctgcttttcaatgctgaagattagttttgtctattctagaatttcatatagatggaatcagagtgtatgcttttttgtgtatgtctgacttcttagcccagtgtactgtttgtatatcagtagttaatccattgtatagctaagtatcactccattgtttggatgttccacagttcatccattctccagttgctcacatttggggtctttccagtttggagctattgcgaataaaagcactgtaaacatttgtgtagactttgaatgcactgtttttacttctcatgggtaaatacttaggagtaggattgctaggtcctatattggtatatgtataactttataagaaactgccaaactgttttttgaagtggctgtattgttttgcagcataagagatttaagttgctccacatcctcaccaacactttctgctgtcagtctttttactttcactctagtgattgcttagtagtatcttattgtggttttgatttttatttgcctgattactaatgtttctgagcaccttggcaagtgcttgtcagccactcatacacaggcccacctcactttactgcacttcactttactgcatgtttgacaaattgaaggttgtggtaaacctgtacccagcaagtctgttggcattatttttccaaaagtgtgtactcacttcatgtcttggggttagattttggtaatttttgcaggatttcaaactttttcattattatccgttattgttatcaaacttttttttttctttttttttgtattttttttttaattttttttttcagtcactctgttgcccaggctggagtgcagtggtgcagtcttggctcactgcaaactccatctcccgtgttcaagcgattctcctgcctcagcctcccaagtagctgggattacaggcatgcgccaccacacccagctaaattttgtatttttagtggagacggagtttcaccatgctggtgtcaaactactggctgcaagtgatccatccgccttggcctcccaaagtgttgggattacaggcatgagccactgtgcctagtcaaaccttttcattattatctgttattgtgatcagtgatctttgatgttactattgtaattattattgaatgccataaactgcacctgtataatacaggaacttaattgataaatgtctgcagcgtgaccaaccattcccccatctctctccctctgcttggtcttccctattccttgagacacaacaatatggaaattaggctaattaataaccttacagtgacttttaattaagtgttcagatgaagggaagagctgcacatctctcatttgaaaccaaaagctataaatgattatacttagtgaagaaggcatgttgaaagctgagacaggctaaaagctaggcctcttgcaccaaatagttagccaagttgtgaatgcaagggaaaagttcttaaaggaaattagaagtgctactccagtaaacccacaagtgataagaaagcaaaacagccttattgcttatatggagaaagtttgaatggtctggatagaagatcataccacccacacatccccttaagccaaagtgtaatacagagcaaggccttaactctcttcaattctgtaaaggctgagagcggagaggaagctgtagaagaaagttttgaaactagcagaggtttattcagagctttaaggagagaggccttctccacaacataaaaatgcaacatgaagcagcaagttatctggaagatctagctgagataattgatgaaggtgactatactaaataatagatttttaatgtagatgaaacagccttctactggaagaagatgctatctaggacttttatagctagagaggagaaatcagtgcctagcctcaaagcttcagaggactggctgactagttaggggctaatagagctggtgagtttaaattgaagccaatgctcatgttctgctctaaaaccatagagccttaagaattacgctaaatctactctgcctgtcctcagtaaacagaacaacaaaacctgatgagagcacgtctgtttacagcatgatttactggatattttaagctctttgagatctgctcagaaaaaaagtttaatttcaaaatattactcactgacagtgtaactagttgtccacaagctctgatggagaagaacaaggagattaatattgttttcatgcctgcttaaataatatatccattcttcagcccatggatcaaggagtaatttcaactttcaattcttactatttaagaaatacagcagggcatggtggctcatgcttgtaatctcagtactttgggaggccaaggtggaaggatcactcaaagctaggagctcaagaccaacctgggtaacaaaacaagtccctgttgctacaaaaaaaaatttttttttaattagctggtcatggtggcatgtgcctgtagtcccagctacttgggaggctgaggcgggagggtcacttgagtccagaagttaaaggctacaatggagaccctgtctcaaagaaaggaagcagggagggacatatgctgtagctgccatagatagtgattcctctgatgaatctgggcaaagtgaattgaaaaccttctgaaaaagattcaccattctagatgccattaagaatgttcatgattcatgggaggagggtgaaatatcaacatgaataagagtttggaagaggttgattccaaccctcgtggatgactttgagaggttctagacttcagtgctggaagttactgcaggtgtagtggaaatagcaagtgaactagaattagaagtgaacctgaagatgtgactgaattgctgcaattttttgataaaacctgaacagatgaggagttgcttcttgtgagtaagcaaagaaagtggtttcttgagatagaattgactcctggtgaagaactgatgactttagaatattacataaacttagttgataaagcagcagcagggtttgagaggattgactccaattttgaaataagttctagtgtgggtaaaatgctgtcaaatagtatcatatgctacagagacatcttcagtgaaaggaagagtcagtcagtgtggcaaacttcgtcagtcttattttaagaaattgccacagctaccaccctgatcagtcagcagccatcaacatcgaggcaagatcctctgtcagcaaaaagattatgatttgctgcaggctcacatgattgttagcatttttagcaataaagcatttttaaattaagttatatacatattattagacataatgctattgcacacttaatagactttagtgctaacataacttttgtaggcactgggaaaccaaaaaattgatgccgcttgctttattgagatggtctggaacctaacctgtagtatctccgaggtatgcctgtatcttcatttgtaatatgtccttcacatcttttgcccttttttattattttatttgttgatcttcttttatggagttgtcagagctctttattattctgtttaccagtcctttctcagatgtatgtattatagttatttttttcccagtctggcctgccttttaattttctcaatggtgtctttcaaagaacagaagtttttaatttttccgaagttcagtttatccatttttcttcatgtttatccactgtgtggtattaaagaagaaagcaatgtgtataagaatagctggttcttccgtaattaatgtttaataaccccattattctccgaaggcatctgtctttgcacacctgacctgctgttccaccaagaaagttccacaaacacttagcagcagccagcctaacctgtttttctccttgctttccacagggtgccatgactcccggaatccctatctttagtccaatgatgccttatggcactggactgaccccacagcctattcagaacaccaatagtctgtctattttggaagagcaacaaaggcagcagcagcaacaacaacagcagcagcagcagcagcagcagcaacagcaacagcagcagcagcagcagcagcagcagcagcagcagcagcagcagcagcagcagcagcaacaggcagtggcagctgcagccgttcagcagtcaacgtcccagcaggcaacacagggaacctcaggccaggcaccacagctcttccactcacagactctcacaactgcacccttgccgggcaccactccactgtatccctcccccatgactcccatgacccccatcactcctgccacgccagcttcggagagttctgggattgtaccgcagctgcagtgagtacttcgtgttttatgtttcctcccacttaggagtccctttgagttatgttcctgctctgttttcagatggatccttttattaagggagggagtggcactaacggtaattgtgtatcaaaatttgctttatctcacatttgggaaagggaagcaaagctatcttagtcagtgtcctcagtaaaaggctcttaacaggtttagaaatgtggtcatttgtgtttacatacctgagccaataaaatttaatctgactttcactgtcgttattattatattatagacatttccctgtatctgatatcgctaaatcacaatgttaggtagtctctttcccttatgctattttaggtctttagtcacaatatcagtataatttctggtagttcttgttttttgtttttactatgggtgctgcatataaatctttgaaggtctgtgtccttcccacaaaatgaagacgactgtttttgtcataaatggatttttctacctaaatgaagtgggttctatatgtaacagtgtagtaggggtaggaaataatttcatcttcctgaaaaaccagcaaatatttccaaataattccagtcaataagaagtgtatagcttttcattttagaaagcttatgaccaaattaaaaggttacttgcagtctctgcatctcctcagttttcttgtacagataccttcctccttcatactccctttagatctagtatttcctatttgcatttattcaccttgttacatatatggttgttgtttataagctatctctcatcatttttggaactaagtggtgtgtaatcgtggatgctgactttcacccaaagacctaaatcttgcctccacaattttgtttgaccccacacacaattttaaaaacaaagtaattttagtgattttagagagagccctttttagctcacccttgtctataccactcccatgtgtccagcatgcttgtctgactcccaggaatatttaagtttgcatttctgatttaaataataaattataaacagtacagtcaggtgtttgtttcttgcgagtgcctttgctgttctgatactccccagagcatccagtcatccacattcctgaatttccactatctactaagaaccctcccgggtggtagttcagtgccctctccatcttgtaggcttaagagggattaaggtaaatatttaattaatgaaaatatataagaatacatttaacaattatgtgactaaagttgtgatagatatactaaaatctacttggtatagttcataagtggacaaatgctaaaggcaggtgtgtatacaagggtgattggaaggaaatagatgatatggaaatgaaaacattcattgtgtggatcaacctaattggctttacagttgtgtatcatagactgtacaagaaaaagaaccagaagcaacaatgagctgaaacctattgtatttgaacctatgtatttgaaatctggactcgatattcttgggatggtgatttccaggtccatgcgagacagttgttgagcagttaattgcattcaaagggcattgcccatttcaactatatatactttcataagcagaaaaatgtataatgaaaatgtgggtttgttgtttaaatttttattaaaatttctaatagagttgctttttagtatatctttatccttgtataagttattcgttaagtgatttaagaacactgagaaatgaaaagggtcagtggacccagatggctccatttatccttatttactgagagttaattagaagagaaagcagggttttgccttttttttttgctaaagacacttagctcttgtttttcaaaagatacttactttgagagaactgggcagttcatgcctgcttgttttcattataaatagttacttaggaatagggtggtggtggtagcttttcagagctcacagatgagaattgagtttgtctgtgagaaggctaagggcaggctctggagacagacagactcaaatcctggctcctccacttgggagccattgcgtcctgagcaagttgcactctacctttaagcctcagcttatttatccaaatgtgggaatactggtaacttctacctcagtgcgttatatgtattaaatggaataatctatataaaatgctcaacatgtgcatgatacttgttaaacaataaatgtgagcaattaaaaaaaagtaaagcctggttgaaataatcagatgtctgcataatttctaacgcctcatccaatgaaacttaagtaatttaaatagtcgtgttttctttttaaatctcttacagaaatattgtatccacagtgaatcttggttgtaaacttgacctaaagaccattgcacttcgtgcccgaaacgccgaatataatcccaaggttagatctattttaatgtatttcttttttttttcttttttgtctcctctgccgtgtctctatattttaatgtatttcacgctataaaacaaatgtctgtagatcaggccaggcacagtggctaatgcctgtaatcccagcactttgggaggctgaggaaggagaatttcttgaacctaggagttcaccaccagcccaggcaacatggcaagaccctgtctcttaaaaaaaaaaaaaaaattggccgggcttggtggctcacacgtgtaatcccagcactttgggaggccgaggtgggcggatcatctgaggtcaggagttcaagaccatcctggccaacatagtgaaaccccgtctctactaaaaatacaaaaatttgccgggagtggtggcatgcgcctgtaatcccggctacttgggaggctgaggcaggagaatcacttgatcctgggaggcagaggttgcagtgagcggagattgcgccattgcattccagcctggcaacagagcgagactccgcctcaaaaaaaaaatctgtatatcaaagagtttgtgttatgcttattccttgacaccaataaaatgaagatctaaagtaaaatgtgcattgttttgtatcttttattgagtgtctgtgatataagaatccctgggagtacagcagtctataaaataagctaagttatatatgtattgtattgggatcatgtgaagaattttgtatatgtatagggatgatgttagccagctatagtaggcaaagtaatttggataaacattagctgggttgagagaaatgttaagtaatggacttagggtgcattttaaaatccctgaaacataatgcctgagatctgaaagacagctaagggtctgaaaatcaccttttaaccactcataatgagtctgtatgacatgtagcattctaagaattaatctttcatctattataatcacatttagttgaatacataattttattactttacgttcttaagtgatatttaaccaataaaaatagtagaggaaattctggaaattcaaaatagctaggcttttcctgggacgtatataaactactatatactgctagcttttttagatgttgataaaatcacagggaagacatagagcaggttttaaactaaaattgttaaaagccaggcatggtgactcagacctgtaattccagcactttgggaggccaaggtgggaggatcacttgaggccaacagttcaagacgagcctgggcaacatagcaaggccttgtttcatcagaaaatttaaaaaattatctggggttggtggcacacacctataatcccagctacttgggaggccaagacagaaggatctcttgagctcaggaattcgaggctgcagtgagccatgattgcaccactgcactccagtctgggcaacaaagtgagactcttgtctctaaaaaaaaaaattaataaaataaaaaaataaaattgttaaagcaatctagtttgtcaaagagtcgtcttaattagaaacatgtaggtttttattgtataattaaatgtattaaaatatttaagttgtttcaaagtaattatttgctttttatcatgtacctaataactgaggccattaattcaacccacagttgaaatattttccccttgagttaccaccttagcaagaaaattttctgaaagaattaacatgtttcaagcataaaaagcagaaaataaaagttaaaactgtgtttttttcctaatttgcatttatgtgtttaatacattaatattgtttctaaagaccaattgaaagcatgattttacttcattacgtattgataggcttgtaatctgatttattaattccattaaggtagaaaaggtttattggtttatttgcctcaaaattcatattaataaaacaaaatgtatcagagaagctatagtcatgataagcagcaaatataaagtagaaacagaagcacttgtatttattgagaacataaccaaattttgcaaacatttctcttgatggaatgctcatgtgaaagaacatacagatttggtataacttagtcacaattgattattttctgctccttatgcaaaggaatatttgttacatgtggtgtatgcaaatcctttacagatatacagaaatacagaacaaatattttgataactagatgtactatgtccttcctaccagttgtgatttttttgtcaatgggtggttcgcctaacaacattgagcagtttggcatgacctcactaatgattctctctgaccattgtagcggtttgctgcggtaatcatgaggataagagagccacgaaccacggcactgattttcagttctgggaaaatggtgtgcacaggagccaagaggtagccgtaagaaattcattcttctggtctatgggttatgaatgaaaaggtgatatctcattgtttttaggttattaggttagcactttaacatgttattattgctttcttataaaaaccattttaatatgattctattaattatttttatttatttatttattatttgattctattaatgttagatagcagtgatttcattttcttaaaaattagatatgggcaggcgtggtgtctcaccaaggcgggcaaatcacttgaggccaggagttcgagaccagcctgaccaacatggtgaaactccatctctactaaaaatacaaaaattagccaggcgtggtagtggatgtctgtagtcccagctacttgggaggctgaagcacgagaatcgcttaaatccgggaggtggaggttgcagtgagctgagatcatgctactgtactccagcatgggagacagaacaagacactttctccagaaaaaagaaaaaaattaggtaagatgtaatacaacatcagaactattaataaaattccctttatgtgaaaaatgttgtaaataacacaaatacatcttgaaatggaagaaaaaattgatcaagaattaaaacacttctaagctaatggtgtaagggctttgcagaccttattgggcctggcagcgtgacagcatcacatgtgttggctgcagaaacctgccttctcactggaactagctttcattaatagtgtttgagttgtgcagatcttaaggaatgcacccttgttataaaatgtcattgcctatattctccatctgaagtgatcctgtctgaaggttagtactctgcggccctgactgttctaaacagagcttatatacttggtagaagtcaaaaactagggggaaaattagtgacattagcttcataaatgaactgaacaaataaactaaaactttttaaatgaaagagtattaaatgtacttggaggtatcaacacatagaagggggctgtggatatttttgcttattctgaagtttgaaattgtctttcagtgatgggaatgccattggtgtggacattctggctcctgatctccgaggtttttcagaatgcaggacaaggatgtgttcttgcctttcacttccccttggccacaacatgcagtagtaacctctttaattaagagcgtttttgtttgcttgttttcccctgcatggaacatcagaaacttttggtttatcaaggcaagcttttcatgcagcatttagcctttttgtcccagagcatctgaaaactgaatattgtatatgtagttggatgactatttcatcaagacaagaaaccaccaatacatttacctgaaatttaaaagcgtagcatatatatatatgcttgatttttgttcttcctgatcccctgcacctgatagtctctttatggtaatattttcacattcttttttgttgttgttgttgtttttgagatggagtctcgctctgcgcccaggctggagtgcagtggcatgatctcggctcactgcaagctccgcctcctgggttcacgccattctcttgcctcagcctcccgagtagcagagactacaggtgcccaccaccatgcctggctaatttttgtatttttagtagagatggggtttcactgtgttagccaggatggtctcaatctcctgacctcatgatccgcctgcctcagcctcccaaagtgttgggattacaggtgtgagccaccgtgcccgacctgcctgcctgcctttttctcttttattttttctttttttctcttctttctttctttccttttctttttttttttttttttttttttttttggtggagtcacctaggctggagtgcagtggcacaatcttggctcactgcaacctccacctcccaggttcaagtgattctcctgcctcagcctcccaagtagctgggattgcaggtgcctggcaccatgcccagctaatttttgtatttttagtagagatagggtttcaccatgttgaccaagctggtctcgaactcttgacctcaggtgagctatccgccttggcctcccaaagtgcttgggattagaggcgtgagccaccatgcctggcccacattctgcttttcttatgtaagctctgaactgctaagtcgtagtttattcaacaaatgacataggaatgtctattcatgatgagtcttggtataaaagaggatagaattagtgaatacattgttcaataataaatctcatcaacattttctgatcaaaatgaagtttgttagttttcctctcagtagaaatgcatgggctaaaatacagaaatagtgatgactgatgatggtgataattcacatccataaaatctagggctacaataatttggcggattgaaaggtcattttggcaggcctacagttttctgtcaaggatccaggaatactttataaggaattgtgaatgcctgtcagtcttttctcctattgcaagaaggctgaccagtttacactttattagtttactgttttggactttttataagttattagtctaaataagtattttagctggctctgagtatgaataactcacttttttcctttccctagtgaagaacagtccagactggcagcaagaaaatatgctagagttgtacagaagttgggttttccagctaagttcttggacttcaagattcagaatatggtggggagctgtgatgtgaagtttcctataaggttagaaggccttgtgctcacccaccaacaatttagtaggtaagtctgaaatgtattatgattgttattggcaacagttcatttataatctaaacattgttcagaataaaacacatgcaaaatattcagtatatgagaacagttgacatggttatagttgtatgtattcttgcattgtcttcctgatgttctcagtcatatttatcaccctcaccagcctctgcttcccttatcactttgcggtacccataactcccctttactggaatgaatttgattctacttctgtatgttttatcgttttattgctgaatacacttggaatgcatgaattgaccctaaccttgtatcaattttttttcccagtttggatcttctcttttagtcaacattgtgtcagatctaccagcaaagtgtgaagttgagcgataggaacaactttctaattatcttccctgctacttgcaggtgaagactcacaggcaggcagccctgcccacctcactgcttcatctcatggtcttctggtgtctgttcacaggcacattagttctgtgtgcccctggggctcacttggttcctcctgccctaggcctttgcacttgccacttttatgcctagtatgctcatttcccttttcacctaggaagctcccacttgagttccatatgtctacccattccactcttcctcagagaagcctgtcctgaattttgtcttaggtcagacacacagaaacagaggcatcctgttttcagtctctccgaactgagaaaaatgagattactaggcttagaagaatatgtaccaggcctggcctggtggctcacacctgtaatcccagcattttgggaggccgaggcaggcagatcagttgagttcaggagttcaagaccagcctggccaacatggtgaaacctcgtctttactaaaaatacaaaaattagctggacatggtggtgcatgcctgtaatcccagttacatgggaggctgaggcaggacaatcattcgaacccaggagatggaggttgcagtgagccaagatcgtgccactgtactccagcctgggcgacacagcaagactccgtctcaaaaaaaaaaagaatatataccaatagtccattcagtcagacagcttaatcaggtataggttaattctcaggctagtatataagtttgattaaatttcctgaccacaattgtcagctagagaatatttcaatttaaggaggtaagatatgattaaaagttaaactgtcagtattggatcttagaagtaaatgattattaggactgtaatagtaattattaggactgtaaaagtaaaggattattatctgcattagatatcattatatctaatgatatagagactgcagacataactacagggctctttttcttaaatcagaaaatccagattcaatagaaatagggtaaagtgataggaggacaaatagccttccatccagtggttatcaactgacgactacaagtcggcctcacttgctttaattattctattctatcctttgatgctgcttgaagaactgtgttttacctcttgactagtttgtttattcagtatttttccttgtacaggtcctcattttatctaaaagcacacaaagctcttgatttctaaactttttgcaattttccttctagttatgagccagagttatttcctggtttaatctacagaatgatcaaacccagaattgttctccttatttttgtttctggaaaagttgtattaacaggtaagttgtaacaggaagtagtatctgaaagtttgtaagtgttttgagtatggcattttctcagtgctgaaaagaaatttcagtgttcggacagtgggctagcttcttgtacaaaggcctcccacccaaagtctgatgagaaacgtgcccactaaaggcacagtgagagcagggaagtctgaccacagctctgcaagcagacttccatttacagtgaggaggtgagcattgcattgaacaaaagatggcgttttcacttggaattagttatctgaagctttaggattcctcagcaatatgattatgagacaagaaaggaagattcagaaatgagtctagttgaaggcagcaattcagagaagaagattcagttgttatcattgccgtcctgcttggtttatggcctggttcaggaccaaggagagaagtgtgaatacatgcctcttgagctatagaatgagacgctggagtcactaagatgattttttaaaagtattgttttataaacaaaaataagattgtgacaagggattccactattaatgttttcatgcctgtgccttaatctgactgggtatggtgagaattgtgcttgcagctttaaggtaagaattttaccatcttaatatgttaagaagtgccatttcagtctctcatctctactccaacttgtcttcttaggtgctaaagtcagagcagaaatttatgaagcatttgaaaacatctaccctattctaaagggattcaggaagacgacgtaatggctctcatgtacccttgcctcccccacccccttctttttttttttttaaacaaatcagtttgttttggtacctttaaatggtggtgttgtgagaagatggatgttgagttgcagggtgtggcaccaggtgatgcccttctgtaagtgcccaccgcgggatgccgggaaggggcattatttgtgcactgagaacaccgcgcagcgtgactgtgagttgctcataccgtgctgctatctgggcagcgctgcccatttatttatatgtagattttaaacactgctgttgacaagttggtttgagggagaaaactttaagtgttaaagccacctctataattgattggactttttaattttaatgtttttccccatgaaccacagtttttatatttctaccagaaaagtaaaaatcttttttaaaagtgttgtttttctaatttataactcctaggggttatttctgtgccagacacattccacctctccagtattgcaggacagaatatatgtgttaatgaaaatgaatggctgtacatatttttttctttcttcagagtactctgtacaataaatgcagtttataaaagtgttagattgttgttataccttgtaagagtcatgtgatcatactgttttctacaaagttgtattttagatataatgcctgaaaccattttggtgtttgcttcagtcagtatttcattgtatgctgcaatgaaaacagattaatgatctgagaaccttccatatattgagcaactcctgttttctaggtattttgcatacaatgcctggaatcctcacaaagcttcagttacgttttgttcctctgttggaggtgaggagataaggaagccccagctgagggacttggctgaggttacacagctagtaagtggtaaaaatgagtgagtccttcaggtgtagaagctggtgccctatccacaggctgccaactctctgcagtaacttttttttgcttgttttgcagtttttttctcatggactatcaggtggacatttgtgggttcttaggttttattgttagagtggtttgttgtttttaattgtaaaagtacatcttcagctgactcaggaataaaatcagaaaggggaggtccttccttcctttctcttctgcctctttccccaagataacgaccagattagtgggtatcttctaagccctgttctgtctatctt

SEQ ID NO: 119 - RNA, 1719 nt, Homo sapiens
  source 1..1719: mol_type = mRNA
ggcggaagtgacattatcaacgcgcgccaggggttcagtgaggtcgggcaggttcgctgtggcgggcgcctgggccgccggctgtttaacttcgcttccgctggcccatagtgatctttgcagtgacccagggtgccatgactcccggaatccctatctttagtccaatgatgccttatggcactggactgaccccacagcctattcagaacaccaatagtctgtctattttggaagagcaacaaaggcagcagcagcaacaacaacagcagcagcagcagcagcagcagcaacagcaacagcagcagcagcagcagcagcagcagcagcagcagcagcagcagcagcagcagcagcaacaggcagtggcagctgcagccgttcagcagtcaacgtcccagcaggcaacacagggaacctcaggccaggcaccacagctcttccactcacagactctcacaactgcacccttgccgggcaccactccactgtatccctcccccatgactcccatgacccccatcactcctgccacgccagcttcggagagttctgggattgtaccgcagctgcaaaatattgtatccacagtgaatcttggttgtaaacttgacctaaagaccattgcacttcgtgcccgaaacgccgaatataatcccaagcggtttgctgcggtaatcatgaggataagagagccacgaaccacggcactgattttcagttctgggaaaatggtgtgcacaggagccaagagtgaagaacagtccagactggcagcaagaaaatatgctagagttgtacagaagttgggttttccagctaagttcttggacttcaagattcagaatatggtggggagctgtgatgtgaagtttcctataaggttagaaggccttgtgctcacccaccaacaatttagtagttatgagccagagttatttcctggtttaatctacagaatgatcaaacccagaattgttctccttatttttgtttctggaaaagttgtattaacaggtgctaaagtcagagcagaaatttatgaagcatttgaaaacatctaccctattctaaagggattcaggaagacgacgtaatggctctcatgtacccttgcctcccccacccccttctttttttttttttaaacaaatcagtttgttttggtacctttaaatggtggtgttgtgagaagatggatgttgagttgcagggtgtggcaccaggtgatgcccttctgtaagtgcccaccgcgggatgccgggaaggggcattatttgtgcactgagaacaccgcgcagcgtgactgtgagttgctcataccgtgctgctatctgggcagcgctgcccatttatttatatgtagattttaaacactgctgttgacaagttggtttgagggagaaaactttaagtgttaaagccacctctataattgattggactttttaattttaatgtttttccccatgaaccacagtttttatatttctaccagaaaagtaaaaatcttttttaaaagtgttgtttttctaatttataactcctaggggttatttctgtgccagacacattccacctctccagtattgcaggacagaatatatgtgttaatgaaaatgaatggctgtacatatttttttctttcttcagagtactctgtacaataaatgcagtttataaaagtgttagattgttgttaaaaaaaaaaaaaaaaaa

SEQ ID NO: 120 - DNA, 26733 bp, Homo sapiens
  source 1..26733: mol_type = genomic DNA
ctaaattataatccccatgtgtccagggagggatctggtgggaggtgattagatcatgggggcagtttttcctatgctgttctcatgatagtgagtgaattctcatgagatctgatggtttaaaagtgtttggcacttccccccttgctctctctcctgctgtcatgtaagacgtgcctacttccacttccaccatgattgtaagtttcctgaggcttccccagccatgcggagctgtaagtcaattaaatcctctttcctttataaattacccagtctcagatatttctttatagcagcgtgaaaatagactaatacatgcctcttgagatcctcacagcaattggtgcctttagacctcttcattcacacttcactcatgtgttcttccttccccaggtagacgcaccctctgaagatggtgactccctcctgagaagctggaccccttggtaaaagacaaggccttctccaaggtaacagggctgagtcaccccagggtcccaaggccggccttttctcacaaatagctgaactcctccactctcagatccaggggccctggactatctcccattgtatgcaaaaatattttatttccgttgacacattactctttggggcagcttgatggttttattaaattttggaaggaggcttcagccccagtaacagccaatgcctgtttgctttcccaggtcaccttgactgtgctacagtagagacctgggaaatgatgggttccagtgctgtggccaagctctccccagtttcaaccccttccaggccttgctgtccatttttactccactgtcaccacatgttcaaattcttgctttctgctcgagtcagtactgctcacctcgttccaagagatctgggtctatgacactgtgggtgacaccctctgagcatcttttccgagctgtctgtgggtacctgaacctgccccccaacctggcccttgccctacctgccccgacctcagcgagtctggcccagtctgtccctgcttctcccctctggccccaagtgttctcaaatatgcccccgcctgcctgtctgtcactgcagctggcccagccctcatcctctctcccatgaacctctgtggtggcctgctctccctggctcccctgtctccagtttatgttccacacaggtgccaaaatgtctgcaaaaaatggagatttaacatacactagcccttggcttaaaacctgtacatgcttctctgccacctgcaaatgacagtcccatttcctcagcaaacctctgcatgttgtgggaacttatggcttctcagcctcccactcggaacccacctctggtttatgctccagaacatgatgttgttggaccctcccctccacctcctccaggctgagttagcctctgtctcccctcctgccctgggcatggctcttccagtagacacccccacatcacagtctaactctgtgtccacattccctgcaactgctgagctcctggagccaggccctgggaaccttgttcctgtttttgttcccagagccaaatagatatttgatgtatgattgttgaatgcagcagtgagtgaataaagacatgaatggttaactgaaaacattttatcaaaactgttatttgtcatcagagcatgggccggtttccaacagctaacatttaggagtgaccatttgccaggcactgttctaagccctttgcatgtggccattcatttcacccacatagcgccatcaatgacatgctgtcactgcattgcttgtcaaaagggggaactgaggcacggaggctgagcttttactcaacatgccatctatgttgagggacttctgacttggatagccgttcaactgcgagcactatggaggccagtcaggcctggccctgccttggaatttctgtgttattcagggacataatggggtttgtgttgatttttgttgggagtgtgtgggttaatctaggtgcaaccctcacctccttcccttctgatgtcctcactcccattggtcatgtgacccttaacgcccatcccaagctcagtgccaattccttgccccagggtcctggggattgacatggatcccaaaagcccgctgctgagaggacagggccactcccacccccctgactgtttcccagagcagctctggggcagaagtaaacttggacccagggggcataaccctttgcccttttatagtctattagaggaggatgaggtctgacatcagctggttcattgccccttgtgccccttgagcacactggggcccagggagagtcacatccctgccttgtggtacaggccaccggccctggacctgtgattaaacattgtccacaattaatttggaattattatctcgtgatacactccataaagttcagtcacacatcttctttttcttctcccctgcctaatgatcagacaagccaggtcttgtgactaaatgaaccgacagctggcagtgttcatctgattttgcaatgcccttattttgttgttgataaactaatgcaaatagctggttggcctggaactggtgattgggaaacattttaacccttctttccttcctctctatcctaaagacttaaaacacacttcacgcagtcacagaaagagctcatagaccagactgcggggcttcaaagccttctatcttatttaatcatctgtaaatagtttaaaggtaaatatggtaataatactagtattctagactattttgggaagccagctgatgtgaataaagggtcagagttaaaagatattgaaggaatgcagttttactgctctgaggtaggtttcaaggcttgagccaggcttagagatctttgtcctgatactggggataaagtgaagagaatatgaatgggtatgtctcgcatggttagaaaatctttttttttcctgtatttgtttaaaaagcattttgtaacttaaaaaaatacctatacaccttttttttttttgagatggagtctcactctgtcactcaggctggagtgcagtggcaccatcttggctcactgcaacccccgcctcctgggttcaagcaattctcccacctcagcctccccagtggctgggattacaggcatgcaccaccacacccagctaatttttgtactttttggtagagatggagtttcatcatgttggccaggcttgtcttgaagtcctggcctcaagtgatctgcctgccttgggctcccaaagtactgggattacaggggtaaaccaccacacctgaccataatacatcttaaatagaacattttccagctaatatttaaatgactgcatgtcattagaatctgaatgagtgttgtgttaaaatattttgtgttttcatatttatttacttacttatagctacggataagaatataggcaaatttaatctcccgtaaaaattaaaaggcagatgttttcaaagcacagaattacatggtctactctagacattgctcctaaggttgagcagaggggataagagctttttctcttttttcctttcctctttttttcatacaaagttcgttgtagatattttagaaagtatagaaagccccgacaaggggaaacccactcaacccaattttaatgttgttgtcatttcttttagtttttttgggtgcatttctatgtagctatatcctattgtacaagcaatttaggatcttgcaatataaaatgaaggcatgacctttgagctggccaaaagtatgggctgatttttgcaaatgggtcctggcagcaggggacataagtggggaaccaatccccacacaagcagaggtgagctggcttaggggcgagtgcatagctgactttggatgtagactagatttggggaaatttaaatggggtccaagactggaaatgtgtaatgggacagaaggtagaaatgtttaaaatcttaagttgttgagtttgttctcaattttgtgaaaactctttatccctttttgttccccaccccattttctaaccagaagtcaaatatgacaacattcatgatgtagaaaaaccagttcatcagtgtgacttgtgggtgagggtggggacagggccggtgttggtatatttagttttagagatttgctggaaaagtaacatttttgcttttgtctttctttcgttcctccatttctccagaagaatatgaaagtgttactcagacttatttgtttcatagctctactgatttcttctctggaggctggtaagttaagtatttctttgtgttcttgtctgctaagaaaatctgttatttagaatacatgaagtaccttccctaacagagtcatttctcatactcgtctctgttgaatctctgggcacagagcctcctggtcatagacctgtactgctggaagttcctctcagcatcttcgtctcattctctcccatatagagtgggaaactgaggcctagtgaggctgagagcccaaggtcatgtagctagttttggaacaaaagctaaaatctaggtctccaatctaggtccaggcctctttccacttggctgctggttgaaagtgtgatatgggaaattctgactttcatttggaggagatattatgtatagtctttatgaacccacagctggaagtcatcaagatacactactttttctgtttctttccatttcttcattttctctaatcttttctctttttgccaggtgctagctactggggatacagcagggaacagtgcacacagaaatacctgcctgcatagggtttatattcttgtagaagagagagataacagataagtagacatatattgtgtcatatgatggcaagtatagggaggaaaaaagagtataaggttttggcattacagtgggcagaaggttaattttttgaatgtggccagaaaaaaacctccctgagaagctgacttttgagttgaccttaaggaaggggaaaagagagctatttggatatcagattggggtgtggaaatattccagtcagcatgtgcaaaggcccagaggccaagagtatttggcaggctttcagaataaaaatatcagcatgtctggagcatagtgagagatgagggaagtcataagggaccaggctgtctgggtaatggggggatggcagagggttgattatatggaatgttgtgcccttttttagggtcttggcttgtagtctggctgggatgggaagacttcagggttctttgtttaagaccagagaggtgatctgacttacgttttgattcctgttttgagaatagatccgagggagccaaagagagaaatagagaagccagtgaagaggcaagccatgatgatggctttctctaggcaagaaatgttgatggcttgtcaaagggtggcaaggagaagtgagaagtagacaaattttgaaatattttgggaacagaaccaagagggatttggagttgggtcagatgtgagatgtgagggaaagagaagaatcaagaattatctcagggaattttggcctgcgcaaacgcaaggtgaaattgccattgatgagatggggaagatcaggttttcagactggatgtgttaagtttagctgtccattagatgtttaaaaggtgactttgactaggcagtctacagcctgagggaaaggtctgggttgaatatataaaattggagacctcagcaagcggctggtatgagaaccatgagactgaatgggatcatggagtgtagttaggaaagataagaactttaaggactgagccagagattgacttaaattccttggtccagtgagttttctcccctttgctgaggggctccatgtgtgttggagcataccttcaacattaaggctgtttaaggccttagccttcacttcctgcttgtgtatgacctcagagtcatccagaaatgagagcctggtgccttctatgcaatttcctgggcatgcacacagccctgcatacatgcccacccttctgggttccccaggaatgtgtcagagcttttcaaagccctctggaggttatggctctggtattgcagctttaggcagttgtaaaaaacaattaacactgagtttttccagcaaacgccttggggatagtgcttttgctgtggagctcttggtgaggtcaataacaccaccaccctatgaatgtgactttgaggacctgccagtcaagtcaaagagtggcagtgctctggaaatgggacttttcgaggagctccaaaccctctctcttcttgcaagcctgctggttttcaaagcctttgtgtctgcaaagctcttgatattcatggctgttttagagctgggaagagtaggatggaagtcatttaagttataaagctacaaaccctgctgatccgtgatttggcatgtttctgtttgtttccttattttctagtaaatgctcttctggttactgcaagcctttgatttttgaaattttttgccagtctttttgttgcctttatggaggaatgatttatgagacccccactccaccatattggaaatcttgcaaattcaatttctttgaatagaaaatagtattaatagatatagggcaatccaggctatctacttcttctcaagggagctttaatagtctggaaaatttgctcatttcatttacgttattaaatttattggcataacattgtttataatattccctcactaccctttacaaattatttaaaaaagagatgtcatctcttttttttcctgattagtctggctaaagatttatcaattttattgattttgtgaaagaatctgcttttggtatctttgatttttcttcattgttcttctgttttctatttcattgatttcctctctgatccatattactattttcttcttacttctgttatattaattatgttttttattttctgtatcttaccatattttgacattctggaagatgtttcatatctagggagagactgctccaccaggggctaagcagttcctaggtgtgttgtggacagcttacagcttgcccttcatgtgagactgcttgacccaagatggtaccccactcacctccttatccaactctcacacacccaaaccaatgttaccccagcctcaatcaacacagggctaggtaccagagaactagggacagcctctatgcccaaagcctgcaaaaatggttcaaatgggccaatctgaaactgtttatgctgccctgccttgcctttcccatgggaaccccagtaaagatgctggcctaggctttccttttgtttctgcttctgcctcctaacccaatctggtgattctccctgtggttttgcgtggtatggcacaccccttctgtccgaaccactaagtaatacaaatctttcaattgcattagtctctgttttgtcactcagtcaccttcgtaaatgaagacccaggcatagaatctctgcttgctgcttactttggaattactttgttctttttctagtttcttaaggtagaagctcaagtcatcaatttgaaatttttaaaaaatatataggcatttaaggctagcagtttccctctaagtactgctttcattgaatgccataagttttgatatgttatgttttccttatcattcagatacaaatactttatattctttttgatttctttgactcatgagttatttaggagtatgttaattttcaaatatatagggattccttggatatctttctattattgatttctaatctaattccattgtcaccagagaataagttttgtctaatttgaatccttttaaatttactgagtcttgggttatggggaagaatatggaaaatttgctaagttttatgtgtgcactttaaaaagaatgtaatgttctactgttgttggttggaattttctgcaaatatcaattatgtcaaattggttgatagtgttgttcaaatcttctatgttgttactgattatccgtttaattttattgcttgttctatcggtccttgtgagtggggtttctctagtttcttgcagaaccagtttctctagttcttgcagttctgtcagtttttgcttcatgtattttgaagcactgttagcagctacataaacatttggtattattgtgttcctgttgattaatgacttctttatttttttaaaatttatttatttatttattcattcatttttgggacaaaagtctctctgtgtcacccaggctggagtgcagtggtgcgatctcggctcacagcaacctctgcctactgggttcaagtgattcttgtgcctcagcctcccaagtagctaggattatgggtgcccaccaccacacctggctgattttttttgtattttagtagaggtggagtttcaccatgttggccaggctggtctcaaactcctgacctcaggtgactcacccgcctcagccttgcaaagtgctgggattacaggcatgagccaccacgcctggctgacttctttatttttatgaaatgccccttttttcttgtaatatttttactgtaaaatctactttgataataatagtcactcaagctttaactaattaatttttattaaggtatagttgacaaaatcgtgtatatttacagtgtacaatgtgatgttttggtatatgtatacattgtgaaatggttaaccctagctaattaatcaaactttcttttcatgagtgttagcctggcaaatatttttcttttctttttaatctatttttacctttatttataaaatgtctgtatgtaggtgtatgtgtttatgttaggcaccacatagttgggcctttctttagccaatctgatcatttccgcctttcaatgagagtgtttagactatttgaaattttagtgtgattattcatatattagggtttaattctgggatcttgctatttgtttttctatttgtcccatcaattctgttatttttttctctttttttgctgccttttagattaattggcatttttaggattcattttattttgctttttggctttttagtcataactgtttgttgtgtatgtgtttttttaatgactgctctggggcttaaatagccatctctaagttatctctgtctgccttcaggtaacactatacagtttcacatatagtatacaaagttaagagtatatacccatttctcctttcttgaactttgccctattatttccatatatgttacttctttatttgttttaaactttatagcattttattattttttatttaaacactcagttttctttaaagagatttaaataataagaaagatgatcttataattacccatttttgttgctattcattcttttgcgtagattcattttcatcttataatattgtgctttttgaaggaattaaatatttcttgtaatgcaggtctactggtgatgacattttacagctttggcaaatctgaaaaagtcagtattttttcctaaattttaaatatattttcatgggatatggaattctaggtagactttttctttcagtactttaacgatattgttttgctctcttctggcttgtattgtttttggaaagaaagctgcatcattttttgtctttgtcctctgcaataattgtgtcatttctcccgggctacatagaagattttatctttgtcactggttttaaacaattttattattatgtgtttgtagtttgctttatgtttcttttgcttggggttcattgtgatatgggggcctatgtatacatcatttttgtcacatcttgaaaaacttcaaatatgttttctgttttccacatttttcttcttcagtgattcatattacatgtattgaagttgtcctaagtaaaataattccctgcccattttattctgttatttttgtctctgtgcttaattttggataatttctaatgctgtgtcttcaagttcactcatctttttttttcctgcagtatcaaatctgccgtgaatcccatccattgttttttgtaactcaacattattgttttcatctctaaaagttttttaaaatctctttcatgtcttcactaatcatgtttgatctttcctgtagcatcttgaataaatggaatacaatagtaataaactattttaatttttaaatttattaggcctattgtctgtgtcatttctgggtcagttttgactgatcgatttttttcctccttatcgttggttgtatgttactgcttctttgcatgcctaattatttttttggatgttagacattgtggattttaccatgttgggtgctggatattttcgtattccccagaatgttcttgagctttgttctgccacatgattgttacttggaaatggtttaatcctttcgggtcttgcttttaagcttaattaggatcaggaaaaagtttattcttggcctaattttccctaatgactgagtcagaacccttctgggtactctgcctgatgccttatcattaatgaggctttccaccctggctgttgggaacagcaactgtttccagcattgggtgtgctccatgtgttactccctccagttcgtttggtagtcctccctctagccttgggtcattttcttatatgcttacactgactgatactcagctgaaaacttgggggagactctcagttatcccaagactctttctgcgtgtcgttatgcagctctaagtacttgggtactctgccctgcaaacttttctacccaggttctcagctccatctcctcaactcactgggctttgcctgtgttttttctcggcaatgtcatggcctagctgtaattttggacacctcctttcttctccgtctttctgggatttctctcctttgttttctgatgttcaatgtcttgaatactgttgtttcatatattttgtccattttttagttgttcatgtgggaaggtaaatccagtttctattactccatcttgtactgaaaggcatgtctctcctcctacattgtccccactttttagatgagtgaaaagggggtgaaggatgttaaataacttgccaggggtacagcacacaggcagtaagtgatgcagctggacttgaatatgcttctcagactccccagataatgatcttatcacaaggctgtaaagcttttatatgtaatgtgaattgatgtatttaataatcaatgtgtttcttcgtagatattaaatcaagacacactggcagatttttatgtaaattgcttccacccttcttccttttaaagataaatgcaaggaacgtgaagaaaaaataattttagtgtcatctgcaaatgaaattgatgttcgtccctgtcctcttaacccaaatgaacacaaaggcactataacttggtataaagatgacagcaagacacctgtatctacagaacaagcctccaggattcatcaacacaaagagaaactttggtttgttcctgctaaggtggaggattcaggacattactattgcgtggtaaggtaagagaggaattagtatgttacaaacatgttctagtttcctgcagttgttaaggacagaaatacttttaataatgcttaacttacctattttattttattttagaaattcatcttactgcctcagaattaaaataagtgcaaaatttgtggagaatgagcctaacttatgttataatgcacaagccatatttaagcagaaactacccgttgcaggagacggaggacttgtgtgcccttatatggagttttttaaaaatgaaaataatgagttacctaaattacagtggtataaggtaattttattttaaatatgacatttcacttttccagaaaataaaatagttccctggacaatagaatgtatctgcaaagtacctttttattttgtatattgttttctctttaatggtgaaacttgatagggaacctaaaaagaattgtaagactgcattcacttaatttgaagcttaactagaaatttgtttgctgttgtttttatttaatttaataagatgtaattgagaaaagtactagaaatagatgtttaaagagaaggctgattataagcttaaggtattgaagatgtaactatttattacaaaacatactatgtgtgttttattgaagatatggtcttcaaataacctgctagtttccataactgtctgaaaagtgggttgactagctttccatggaacaccccatgttttggtaactttaatctacctagtctgatggaacttaaatggggaatcatcttgtagagcttaagacgtactaaatacgtaatatcaatgaagtgcagtattgttaagaaactatatagtgttaacatttttttcaaacatgtttttcttgcaaaataaattggccttcacttcatagtacaagtctcatagacttgaaaacttaatgtcataggaatatagttaactgtttccaaaaagccagtattaaaacttactatatgtaaggaacttttccagtcactttctaaaaatataacatttgctaaggtgaaaaaaatggagctcctttggcggtagattggggaaagttattggttattggttttcaatgcttctctctccctttatctaggattgcaaacctctacttcttgacaatatacactttagtggagtcaaagataggctcatcgtgatgaatgtggctgaaaagcatagagggaactatacttgtcatgcatcctacacatacttgggcaagcaatatcctattacccgggtaatagaatttattactctaggtgagtcatagctccagccctaaaaggtttagatctgggaaggtccagagactgtgattctaatactactttcattatccatgaagaaaccaaatccaagacgacctcaatgataccacaaaagtcacatggctttagttttgtttttttgttactaaatactatgtaatgtttttccattcctgcttcagatgtagttctaattaaatagagacattatgagctgtgttttccaactgatttaagagggttgttctttggcatggctaaaaatggttcttactgaaagctctggggctccctctggctggtatatgggaatgttctgagagcctgcacctggggaatctcagtgagtgtcagtgtctagcagcaagcatcggtgtggacactaatgagctttggaataagtcacatttccagaatctacctcctgttcattctgtgttaggtgttaacctctctaaccctgtttcctcttctgtaacaagatgatgcaatctcccaaggttattgggaagattagagatatggggtacacgaaacttgtgtacctggtgcaaagaaatgcttggtgcaaaacagctatgcaattaataggtgtaggatgattgttcttgttaattttcttgtgtctttcaattctgcgttaaccatgtttcatattgaaaactatatcacagcaaaatgaaacaaaatgcacaaattgccaggggatagtcagaatgctcaaactttttgtaaatattgagattttgtaagatttatgtaataaaataagagttattccaatcagaacttttttgcaggttataggggtgactattagtagttatgctgggacaacaggtataaattgggactatcccaagcaaactcagaatatgatcaccctataaatagcttcacttttccagttatataatactttattttcctaaaaatatttttattaaataaaagttaattccttgccatggtcccacaggcatcagtgaatcccaattttcaatggtctttgtatcaaaccatgttcttgagtttttagcagcctgtcattgggtagctctggtctgtctttcctgaaacatagtaacctaaccagcaagtagaacttgagagagaactgggcactggggactatttaagctaggttaagtgtttttttttttttttttttttttgagatggagtctcgctctgtcacccaggctggagtgcagtggtgcgatctccgctcactgcaagctctgcctcccgggttcatgccattcttctgcctcagcctcccgagtagctggaactacaggcgcccgccaccacgcccggctaatttttttgtatttttagtagagatggggtttcaccgtgttagccaggatggtctcgatctcctgacctcgtgatccgcccacctctgcctccttaagtgctgggattacaggtgtgagccaccgcgcccggccaggttaagtgtgtttttgatattctctgtttccttttctgatcccatttgtagaaacaatatactctactcggagtgaggtaatattttgttttctttccaaggcccacaccaatgatgcctagcactttttgttcactcaaggattcaaaaatatttattgagcatttactatgtttcaggaactgtaataggtatacattagggaaaaaaacagagaatatcctaccttcatggtgttcactttttttttgattgggggaataccgagtgctcaattttatagtttctcatagtttcttcatggccacagataaacccctgaaaccaatcttttcataaataagtcagattaatttctggggcttcttgatacttttttgcctattttaataaattacagcattattccataaccctgtagttctcactattgggtcattaacacagtcattaaatgcaagcaggtctagtattgactagcccttctggccaataacacccaattcaaggaagtgactttccactactctcgcctttgctgacatgctttcacttaagagaggcatttgtctggggacccagggtcctggtgatgtgtgtgtttttcagtagcaccccactctatgaattcggaaggtctagctctaccccgggattcacagtgtgctgtggcctctgcctcagctttcttccttcactttctgcctcctgtctcctggcatatgtgctttgaacacttgatggaatatctggccagaagtcatttagtatgttttgctaagtgttgtcgtcacttgagattctgatctataagagactgacaaaccttatggatgtttttctttcagaggaaaacaaacccacaaggcctgtgattgtgagcccagctaatgagacaatggaagtagacttgggtaagtgggcttcagtgagggtatgctggaatcggttttttttttttaaaacataagagtaagataaattgtatctttactatatataatctaagccatttactgtataaatctatcaatggagggaaagtgagacaaattatatcttaattttttgtatttcttgcctctatggcaaacatcttgccatgtctgatatctccagccctacttttctgtgaacacttattaccatgaaaacaccaaccagacaccaaggtcaaaaggcctaggaaccagcaatgccattgactggtacaggattggatttctttctttttttttttttcacagagttaaaatatttaatgacaaaaatagggtttgctgtaaaagtgaatcaatacagtaggtgttacttatctctgaattaaacaaaaattatatttgacatcttaaagaacttctgaagaattgatcattgtacgacagacatcagcagtgttacaatttcaggactggatttctcatgaccagatccaagctttgagtcggaagagtaaggctacaggccccaaagatggtagtcattctagaaaagtatttttccaagttagtgaacattttttattcaagagtaaagaaagaaccccacaagcatctagctctgcactgtttagtgcagtagttactaggcgcatggagttatggacatgtacaattaaattaagtcaattgattcatttagttaaattaaaaattagttcctctgtcacattagccatatttcaagggcttaatagccacatgtgacaagtgactactgtacagacaagcacaaatatagaacatttccaacatcactgaaagttctattggaaaccactgatcaagagagaaaaagtggttctttgtgtcagaggacccaaaataggttggccttggaattgtcctctgtaatagtaactgcatgacagcagtcaagaaccatacagaggttagaaggtatatgcttgtgatctgtgaattctgtacttggccaattctgtacttgttatttatggtggaaggtggtagaaagacattcttagacagaaacaaaaatgtcaaaactcaaaattaaatatgggccaataggctctagaacaatgtttctcaaccatctttttttgttttaaattgttcccctttagagtctaaaaagtcttcttccacctaattctctttcctgtctttaaatttcagtaccacagttatcttttatatttgctgatatactgtggccctttggagtaccacaaaccatgtaatatctaaggttttcttgcctcttccccaagaaccagtttttgccctgctggccacagcccctgttgaaaatgcctgccctagaagtgtgtaattgagagctctgatgcctaggctgcattgatctctcaatctacaaaaaaaagcttcaaattaggaaataattattttaatgtattatattgacagtggatcagaagcatatagtaccctgtcataggattatcctgaagggtgttaaacaggcaataagatccaataccattactcctaaaatgacttagaaaaatagggattgagagatatttccttaacttaataaataacatcagtgcaagccaatagtcactaatattcttcatggtgaaatactatagaccttctcactaaagccaagagcaagacaaagatgcccatgtaaccactattactgagcacagtctagaagtgcctactaatgcaattgaaggaaaaaaacaaggtatgcttaccacaagggaaaaaagacatttttattattgtttcctgatcataccaatcccaagaaaattcccgggaaaaactagaattaattctgtataaattagtcagataataaattaacatttagaattaatgttctaaaatataagacttgtttagcaataaccagctagaaaacataataggaaacaaatgccatttgcaccagtaaatgtcttagaagtgtccataaaatatgttagaaaaactttgaaaatatgtggaatttataagagaggaaaaaactaaaaaaaccaaaaccctgaatattaatctcagaaaaactgaaatttaaagcatgcatccagccaggcgtggtggctcaagcctgtaattccagcactttggtaggccaaggtggacagatcacttgaggccaggtgtttgagaccagcctggccaagatgttgaaacaccatctctactaaaaatacaaaaattagctgggtgtggtggtgcacacctgtagttccagctgctcaagaggctgaggcatgagagtcacttgaacccaggaggagaaggttacagtgagccgagattgtgccactgcacttccagcctgagtgacagagcgagactgtgtctcatttttaaaaatggaattaaataatggatagagggataacagtttttaaaaaggaaggccgatgagcaccaagctaatgaaaagcatgttgattcaccgtgaattcaagaaatgtagatgaaaacttaagtgacattttcttctctcaaaaggcaatgtctaaccaaaaacacttgttatctggtggttttggggaaaatcgtgctcacatacactattggagagagggtagactgacacagcctcactaaagagagggggttagcttttaaaatatgtttctttaattcaatcttgcttctagattttaatacttcaggatgtgtacaaataaggctattcattaaaatattaatcataatagtgaaaaattaggaaattgtgttcatcaataggaaatagttaatcatagtgtatatgtattatggaatgctaagcagccatgacagagtctattttggaagacaaatcatgtgggcccaaattcccaatccacagtaattacaaaatagtaggcaaaaagaccccatttcaaaaactgcacatgttcacagagaagataaggaatgagacgcataaggttactaatggtggttttctctgggtggtgggtttagggtaattttcctttttctttgtgcatttctatatctaaaattttaattcaatagccatttattaatctagatagatcagaaaaaatcaattaatgttaagattaaaaatacattctttgcaggatcccagatacaattgatctgtaatgtcaccggccagttgagtgacattgcttactggaagtggaatgggtcagtaattgatgaagatgacccagtgctaggggaagactattacaggtatgtatgctaagagttattcacattttggtgttaaatcccacgtgatattttatataaccttgtcggttcagtttaaaagcaagtgttagttgctcctaacctttgctgcctttttttttttttttttttttttttgctaagctaagtagaatttataagatcttgtacatttaaggtaaaaaatacttgtcattgtggtgcaaattacagaccacttagaagcctttctcttacgttatacatgttgcaacatttcaacgaagcaattatctttcattattcttcatattcctcaagtagcttagaagagactcattaatgagctcaagaatcaggcaatccactgctctcgaaagcctctactggtttcctactgctcatctatgggacaaggatctcctggcttcccatgacctctccttcacaacacctgcaaagcactttgtcatctgccccaatctcctcttgtttagtgtctcctctgtgccccatggagaacacaatgcatttgtctacatttttcttcttggaagtggtaatttttttgctttctctgctactgagcctgttactgacagtggtcttggggttataaaatctcagattagtgttgccagcagtctgaatgttgtgactgtgattgggcagggtgattatttcagtggcaattttgtcacaaataaggaaatacacagggtatacaggtcttatttgtagttgatgcaattaacttacacaagtttatttactctctctctcgaatagtgtggaaaatcctgcaaacaaaagaaggagtaccctcatcacagtgcttaatatatcggaaattgaaagtagattttataaacatccatttacctgttttgccaagaatacacatggtatagatgcagcatatatccagttaatatatccaggtaaacaacaaactaattgaaatgcagttttgttttactgtagtaagattccatgactttgaagtttgaaatgccatttcctctgcttagaacacgcttcacttcctcattacttgggtaacttctatttctcttttactcttctgctgaactctctcttcttggaagcttttctgtcctgctgcctgcccttaacccagctctcggcccaaagagaggaggttagggcctctgtatgtacttctgtagcaccatatgtcacaggatctatggtacttcgttttctgtacttaactataaattctgtgatggtggcaaccatttatcttagtaatcattctatttccacagctaatggcaagttaggtctggtacattgtgggtacccaatgaactacattgatgatgcatagggtaagactaaatatccactttcaaagaggacatcagaagtcactgggtttcatgaattggtataataaaacataatattgaaagtatttgtgaaacattttaaggtaatttgtggtttaattaaacataggctattataattgcgtgcatggaagaatatctgaaagactctataaattaacttctatgtatgtttaaatactggcagcatacaaatagaaattacatttaaaagataacatttatggtagcatcaaaaatcatcaaatacttaagaataaatctagcaaaagctgttcaaaacctctgtaatacaaactaaaaaatattgagataaattagagaagaactaaatggaaggatatacaatgttcatagattgaaagactcgatattatgaagatatcagttcttccccaaatgaatctatggattccaaaaaatttcaatcaaaatctcagcagtatttgtacaagtgagagtcagtgtttgtatgggtgtgtttttgtggacacctgtaaaagtcatagggaactgtaaaggaccaagtatagtcatggtggtcttaaataagaaaaataaatctggaggattattactacagacatcatgatcttgtatgaagcgacagtacttaagaccgtaagtgtgaactatcatttgggccagctggatatttgtctggaaaatggtataacttgatttctgttttatatccaaatcatttaaattggaaaagtaaataaagcttttagattcccttttctggatgcttttacatggttcctgatatttagagggtactttctttttcttccctctttcttcttctctagccccctccccatcacctactccatctgctccccagcttcctctttaattattggataactaagtagagaaggaggccaggagaatgtggaaatgtgaaacttccctaagcctccaccttattcgctttccaccagtctttaactttacccaatggactctctgacctcagggaacttttgtaggcttttgagtgattttaacttttccctgttttactgtggaatgctctatcctgtggtcttcggtattatttcccatgttattgtatattatgctatttaggtagaaacttcatagaatgcaccttagttttatcattgctttgtacattagtatccattacaaagtgataataatgaatgagttaatattgtctgaatgcaggccattcccagatatgggctctctgagacgaagatatttaatttgctgtgctcaaagttttaattctttttggttctaatattttttctcctttttttttctttttgctatagtcactaatttccagaagcacatgattggtatatgtgtcacgttgacagtcataattgtgtgttctgttttcatctataaaatcttcaagattgacattgtgctttggtacagggattcctgctatgattttctcccaataaaaggtataattttgtattccatgcagtatttcttgttggagataagggatagttaggagatgtagaagatgactaagagggtttttactaagagggtttctaaaatgaaaagtggcatatacaagaatactagttattcttacacagaattatagttttagaactcattaggctgaatatcattgttttctaagttcctgcctcaacattcatattggtagaataaacaggtatttagagcatctgtttataaattcagttatgcacaagccattggtaggccttgctctgtgatgaataggacagacagagatcataccttaatgaaagaaatgaaatgactagatcttcatgcatcagggaggttctctctctcctttgtttaaactttgcgaaaaaaaaaaaaggaataccacaatatctaaaaaaaaatgaatggatagaattcagggctgagacctctggggaagaagatgaggacagggagactttaaggatggctctatactaagagtatacgaggcagcctccaaatagaagaacaaatttgcagtaaaacacaagaaatagaaaccttgtaagagatgaacactttttaaagggattatatttttggtattgctgcttcagtcatgccattgtataaaaaaagatgaatagttcattatgtaatgaatgtttgtgatactgactttatcaaatctcttatttttgccttgtggttctaaatacattatgtttttcctttagcttcagatggaaagacctatgacgcatatatactgtatccaaagactgttggggaagggtctacctctgactgtgatatttttgtgtttaaagtcttgcctgaggtcttggaaaaacagtgtggatataagctgttcatttatggaagggatgactacgttggggaaggtatgtgtgtaatggaacagagtaaaggcttattgttgtaaaactacttagtaaaatgtggattccatctttctagaagatcgtggcataggggtatatgtttcacaattttaagaacctcttcagaagtgtatgatgatttttacatttattaaatgcatttacttctctcatattttgtcagagcaataattaagtgattttcatttagttttgaaaaacttaatgactagttaaacccaacagttgctttacaactgatacaattaaacaggagtggtagagatcaaatgattgaataataagtttttaaaattccaacaaagttttctgagttctaaatgaaatatttgtcttttgagggccaatttttgagttagtctataaaatgggaggtttgcagtggctcatgccttttatctcagtacaaccctgggaggccagggtgagagggtcacttgagcctaggagtttgaggctgcagtgatccaagatcacgccactgcgctccagtgtgagcaacagaacaagagactgtctcttaaaattaattaattaaaaacatgggaaactcctttaattttaagtaagacaagaaaaaggcattaggagccatacggttgtgaaaagccttgtgtggctttggttcaggagagaatgatgataaatagaattttacttactatattgtgcttcctgtttttcagacattgttgaggtcattaatgaaaacgtaaagaaaagcagaagactgattatcattttagtcagagaaacatcaggcttcagctggctgggtggttcatctgaagagcaaatagccatgtataatgctcttgttcaggatggaattaaagttgtcctgcttgagctggagaaaatccaagactatgagaaaatgccagaatcgattaaattcattaagcagaaacatggggctatccgctggtcaggggactttacacagggaccacagtctgcaaagacaaggttctggaagaatgtcaggtaccacatgccagtccagcgacggtcaccttcatctaaacaccagttactgtcaccagccactaaggagaaactgcaaagagaggctcacgtgcctctcgggtagcatggagaagttgccaagagttctttaggtgcctcctgtcttatggcgttgcaggccaggttatgcctcatgctgacttgcagagttcatggaatgtaactatatcatcctttatccctgaggtcacctggaatcagattattaagggaataagccatgacgtcaatagcagcccagggcacttcagagtagagggcttgggaagatcttttaaaaaggcagtaggcccggtgtggtggctcacgcctataatcccagcactttgggaggctgaagtgggtggatcaccagaggtcaggagttcgagaccagcccagccaacatggcaaaaccccatctctactaaaaatacaaaaatgagctaggcatggtggcacacgcctgtaatcccagctacacctgaggctgaggcaggagaattgcttgaaccggggagacggaggttgcagtgagccgagtttgggccactgcactctagcctggcaacagagcaagactccgtctcaaaaaaagggcaataaatgccctctctgaatgtttgaactgccaagaaaaggcatggagacagcgaactagaagaaagggcaagaaggaaatagccaccgtctacagatggcttagttaagtcatccacagcccaagggcggggctatgccttgtctggggaccctgtagagtcactgaccctggagcggctctcctgagaggtgctgcaggcaaagtgagactgacacctcactgaggaagggagacatattcttggagaactttccatctgcttgtattttccatacacatccccagccagaagttagtgtccgaagaccgaattttattttacagagcttgaaaactcacttcaatgaacaaagggattctccaggattccaaagttttgaagtcatcttagctttccacaggagggagagaacttaaaaaagcaacagtagcagggaattgatccacttcttaatgctttcctccctggcatgaccatcctgtcctttgttattatcctgcattttacgtctttggaggaacagctccctagtggcttcctccgtctgcaatgtcccttgcacagcccacacatgaaccatccttcccatgatgccgctcttctgtcatcccgctcctgctgaaacacctcccaggggctccacctgttcaggagctgaagcccatgctttcccaccagcatgtcactcccagaccacctccctgccctgtcctccagcttcccctcgctgtcctgctgtgtgaattcccaggttggcctggtggccatgtcgcctgcccccagcactcctctgtctctgctcttgcctgcacccttcctcctcctttgcctaggaggccttctcgcattttctctagctgatcagaattttaccaaaattcagaacatcctccaattccacagtctctgggagactttccctaagaggcgacttcctctccagccttctctctctggtcaggcccactgcagagatggtggtgagcacatctgggaggctggtctccctccagctggaattgctgctctctgagggagaggctgtggtggctgtctctgtccctcactgccttccaggagcaatttgcacatgtaacatagatttatgtaatgctttatgtttaaaaacattccccaattatcttatttaatttttgcaattattctaattttatatatagagaaagtgacctattttttaaaaaaatcacactctaagttctattgaacctaggacttgagcctccatttctggcttctagtctggtgttctgagtacttgatttcaggtcaataacggtcccccctcactccacactggcacgtttgtgagaagaaatgacattttgctaggaagtgaccgagtctaggaatgcttttattcaagacaccaaattccaaacttctaaatgttggaattttcaaaaattgtgtttagattttatgaaaaactcttctactttcatctattctttccctagaggcaaacatttcttaaaatgtttcattttcattaaaaatgaaagccaaatttatatgccaccgattgcaggacacaagcacagttttaagagttgtatgaacatggagaggacttttggtttttatatttctcgtatttaatatgggtgaacaccaacttttatttggaataataattttcctcctaaacaaaaacacattgagtttaagtctctgactcttgcctttccacctgctttctcctgggcccgctttgcctgcttgaaggaacagtgctgttctggagctgctgttccaacagacagggcctagctttcatttgacacacagactacagccagaagcccatggagcagggatgtcacgtcttgaaaagcctattagatgttttacaaatttaattttgcagattattttagtctgtcatccagaaaatgtgtcagcatgcatagtgctaagaaagcaagccaatttggaaacttaggttagtgacaaaattggccagagagtgggggtgatgatgaccaagaattacaagtagaatggcagctggaatttaaggagggacaagaatcaatggataagcgtgggtggaggaagatccaaacagaaaagtgcaaagttattccccatcttccaagggttgaattctggaggaagaagacacattcctagttccccgtgaacttcctttgacttattgtccccactaaaacaaaacaaaaaacttttaatgccttccacattaattagattttcttgcagtttttttatggcatttttttaaagatgccctaagtgttgaagaagagtttgcaaatgcaacaaaatatttaattaccggttgttaaaactggtttagcacaatttatattttccctctcttgcctttcttatttgcaataaaaggtattgagccattttttaaatgacatttttgataaattatgtttgtactagttgatgaaggagttttttttaacctgtttatataattttgcagcagaagccaaattttttgtatattaaagcaccaaattcatgtacagcatgcatcacggatcaatagactgtacttattttccaataaaattttcaaactttgtactgttatcctgagaatctgttctttgtccagtccacagcttacctgcacatttgcacattcccaggcctcaacaaggtgaggagaccttctgcagagagttcttcctgttgtggggaagcaggtggggaggagctggaggaggggaggggagtggaggtcagaggctattggcttaacagtgagccctaactcccatcttctagctaaactctactccctctgctcatttgcttctaaaatggattaaaatgtgagccttgtcaataactgtttattaacttcttatcaatttactattaacttatcactttacctgtccaaaaaatgataaagggaatatttgtatagacttttacattttacaaagcgcttttattttttcctttgacccagaaggtgggcaaa

SEQ ID NO: 121 - RNA, 4909 nt, Homo sapiens
  source 1..4909: mol_type = mRNA
tagacgcaccctctgaagatggtgactccctcctgagaagctggaccccttggtaaaagacaaggccttctccaagaagaatatgaaagtgttactcagacttatttgtttcatagctctactgatttcttctctggaggctgataaatgcaaggaacgtgaagaaaaaataattttagtgtcatctgcaaatgaaattgatgttcgtccctgtcctcttaacccaaatgaacacaaaggcactataacttggtataaagatgacagcaagacacctgtatctacagaacaagcctccaggattcatcaacacaaagagaaactttggtttgttcctgctaaggtggaggattcaggacattactattgcgtggtaagaaattcatcttactgcctcagaattaaaataagtgcaaaatttgtggagaatgagcctaacttatgttataatgcacaagccatatttaagcagaaactacccgttgcaggagacggaggacttgtgtgcccttatatggagttttttaaaaatgaaaataatgagttacctaaattacagtggtataaggattgcaaacctctacttcttgacaatatacactttagtggagtcaaagataggctcatcgtgatgaatgtggctgaaaagcatagagggaactatacttgtcatgcatcctacacatacttgggcaagcaatatcctattacccgggtaatagaatttattactctagaggaaaacaaacccacaaggcctgtgattgtgagcccagctaatgagacaatggaagtagacttgggatcccagatacaattgatctgtaatgtcaccggccagttgagtgacattgcttactggaagtggaatgggtcagtaattgatgaagatgacccagtgctaggggaagactattacagtgtggaaaatcctgcaaacaaaagaaggagtaccctcatcacagtgcttaatatatcggaaattgaaagtagattttataaacatccatttacctgttttgccaagaatacacatggtatagatgcagcatatatccagttaatatatccagtcactaatttccagaagcacatgattggtatatgtgtcacgttgacagtcataattgtgtgttctgttttcatctataaaatcttcaagattgacattgtgctttggtacagggattcctgctatgattttctcccaataaaagcttcagatggaaagacctatgacgcatatatactgtatccaaagactgttggggaagggtctacctctgactgtgatatttttgtgtttaaagtcttgcctgaggtcttggaaaaacagtgtggatataagctgttcatttatggaagggatgactacgttggggaagacattgttgaggtcattaatgaaaacgtaaagaaaagcagaagactgattatcattttagtcagagaaacatcaggcttcagctggctgggtggttcatctgaagagcaaatagccatgtataatgctcttgttcaggatggaattaaagttgtcctgcttgagctggagaaaatccaagactatgagaaaatgccagaatcgattaaattcattaagcagaaacatggggctatccgctggtcaggggactttacacagggaccacagtctgcaaagacaaggttctggaagaatgtcaggtaccacatgccagtccagcgacggtcaccttcatctaaacaccagttactgtcaccagccactaaggagaaactgcaaagagaggctcacgtgcctctcgggtagcatggagaagttgccaagagttctttaggtgcctcctgtcttatggcgttgcaggccaggttatgcctcatgctgacttgcagagttcatggaatgtaactatatcatcctttatccctgaggtcacctggaatcagattattaagggaataagccatgacgtcaatagcagcccagggcacttcagagtagagggcttgggaagatcttttaaaaaggcagtaggcccggtgtggtggctcacgcctataatcccagcactttgggaggctgaagtgggtggatcaccagaggtcaggagttcgagaccagcccagccaacatggcaaaaccccatctctactaaaaatacaaaaatgagctaggcatggtggcacacgcctgtaatcccagctacacctgaggctgaggcaggagaattgcttgaaccggggagacggaggttgcagtgagccgagtttgggccactgcactctagcctggcaacagagcaagactccgtctcaaaaaaagggcaataaatgccctctctgaatgtttgaactgccaagaaaaggcatggagacagcgaactagaagaaagggcaagaaggaaatagccaccgtctacagatggcttagttaagtcatccacagcccaagggcggggctatgccttgtctggggaccctgtagagtcactgaccctggagcggctctcctgagaggtgctgcaggcaaagtgagactgacacctcactgaggaagggagacatattcttggagaactttccatctgcttgtattttccatacacatccccagccagaagttagtgtccgaagaccgaattttattttacagagcttgaaaactcacttcaatgaacaaagggattctccaggattccaaagttttgaagtcatcttagctttccacaggagggagagaacttaaaaaagcaacagtagcagggaattgatccacttcttaatgctttcctccctggcatgaccatcctgtcctttgttattatcctgcattttacgtctttggaggaacagctccctagtggcttcctccgtctgcaatgtcccttgcacagcccacacatgaaccatccttcccatgatgccgctcttctgtcatcccgctcctgctgaaacacctcccaggggctccacctgttcaggagctgaagcccatgctttcccaccagcatgtcactcccagaccacctccctgccctgtcctccagcttcccctcgctgtcctgctgtgtgaattcccaggttggcctggtggccatgtcgcctgcccccagcactcctctgtctctgctcttgcctcgacccttcctcctcctttgcctaggaggccttctcgcattttctctagctgatcagaattttaccaaaattcagaacatcctccaattccacagtctctgggagactttccctaagaggcgacttcctctccagccttctctctctggtcaggcccactgcagagatggtggtgagcacatctgggaggctggtctccctccagctggaattgctgctctctgagggagaggctgtggtggctgtctctgtccctcactgccttccaggagcaatttgcacatgtaacatagatttatgtaatgctttatgtttaaaaacattccccaattatcttatttaatttttgcaattattctaattttatatatagagaaagtgacctattttttaaaaaaatcacactctaagttctattgaacctaggacttgagcctccatttctggcttctagtctggtgttctgagtacttgatttcaggtcaataacggtcccccctcactccacactggcacgtttgtgagaagaaatgacattttgctaggaagtgaccgagtctaggaatgcttttattcaagacaccaaattccaaacttctaaatgttggaattttcaaaaattgtgtttagattttatgaaaaactcttctactttcatctattctttccctagaggcaaacatttcttaaaatgtttcattttcattaaaaatgaaagccaaatttatatgccaccgattgcaggacacaagcacagttttaagagttgtatgaacatggagaggacttttggtttttatatttctcgtatttaatatgggtgaacaccaacttttatttggaataataattttcctcctaaacaaaaacacattgagtttaagtctctgactcttgcctttccacctgctttctcctgggcccgctttgcctgcttgaaggaacagtgctgttctggagctgctgttccaacagacagggcctagctttcatttgacacacagactacagccagaagcccatggagcagggatgtcacgtcttgaaaagcctattagatgttttacaaatttaattttgcagattattttagtctgtcatccagaaaatgtgtcagcatgcatagtgctaagaaagcaagccaatttggaaacttaggttagtgacaaaattggccagagagtgggggtgatgatgaccaagaattacaagtagaatggcagctggaatttaaggagggacaagaatcaatggataagcgtgggtggaggaagatccaaacagaaaagtgcaaagttattccccatcttccaagggttgaattctggaggaagaagacacattcctagttccccgtgaacttcctttgacttattgtccccactaaaacaaaacaaaaaacttttaatgccttccacattaattagattttcttgcagtttttttatggcatttttttaaagatgccctaagtgttgaagaagagtttgcaaatgcaacaaaatatttaattaccggttgttaaaactggtttagcacaatttatattttccctctcttgcctttcttatttgcaataaaaggtattgagccattttttaaatgacatttttgataaattatgtttgtactagttgatgaaggagttttttttaacctgtttatataattttgcagcagaagccaaattttttgtatattaaagcaccaaattcatgtacagcatgcatcacggatcaatagactgtacttattttccaataaaattttcaaactttgtactgttaaa
